(19) United States
(12) Patent Application Publication
(10) Pub. No.: US 2023/0042171 A1
(43) Pub. Date: Feb. 9, 2023

(54) MICROBIAL PRODUCTION OF MOGROL AND MOGROSIDES

(71) Applicant: Manus Bio Inc., Cambridge, MA (US)

(72) Inventors: Michelle N. GOETTGE, Cambridge, MA (US); Ryan N. PHILIPPE, Orleans (CA); Ajikumar Parayil KUMARAN, Cambridge, MA (US); Christine Nicole S. SANTOS, Cambridge, MA (US); Jason Eric DONALD, Cambridge, MA (US); Christopher FREI, Cambridge, MA (US); Aaron LOVE, Cambridge, MA (US); Kaitlin CHAMBERS, Cambridge, MA (US); Joyce SAMSON, Cambridge, MA (US); Christopher TOOMEY, Cambridge, MA (US)

(21) Appl. No.: 17/785,488

(22) PCT Filed: Dec. 16, 2020
(86) PCT No.: PCT/US2020/065285

§ 371 Date: Jun. 15, 2022

Related U.S. Application Data
(60) Provisional application No. 63/075,631, filed on Sep. 8, 2020.
(60) Provisional application No. 63/085,557, filed on Sep. 30, 2020.
(60) Provisional application No. 62/948,657, filed on Dec. 16, 2019.

(51) Int. Cl. C12P 17/02; C12N 9/02; C12N 9/14; C12P 19/18; C12P 19/56; C12P 5/00

(52) U.S. Cl. CPC C12P 17/02; C12N 9/0077; C12N 9/14; C12P 19/18; C12P 19/56; C12P 5/007; C12Y 303/0201; C12Y 504/99008

(57) ABSTRACT

The present invention provides host cells and methods for making mogrol glycosides, including Mogroside V (Mog.V), Mogroside VI (Mog.VI), Iso-Mogroside V (Isomog.V), siamenoside, and glycosylation products that are minor products in Siraitia grosvenorii. The invention provides engineered enzymes and engineered host cells for producing mogrol glycosylation products, such as Mog.V, Mog.VI, and Isomog.V, at high purity and/or yield. The present technology further provides methods of making products containing mogrol glycosides, such as Mog.V, Mog.VI, and Isomog.V, including food products, beverages, oral care products, sweeteners, and flavoring products.

### CROSS-REFERENCE TO RELATED APPLICATIONS

[0001] This application claims priority to, and the benefit of, U.S. Provisional Application No. 63/085,557 filed Sep. 30, 2020, U.S. Provisional Application No. 63/075,631 filed Sep. 8, 2020, and U.S. Provisional Application No. 62/948,657 filed Dec. 16, 2019, the disclosures of which are hereby incorporated by reference in their entireties.

### BACKGROUND

[0002] Mogrosides are triterpene-derived specialized secondary metabolites found in the fruit of the Cucurbitaceae family plant Siraitia grosvenorii (a/k/a monkfruit or Luo Han Guo). Their biosynthesis in fruit involves a number of consecutive glycosylations of the aglycone mogrol. The food industry is increasing its use of mogroside fruit extract as a natural non-sugar food sweetener. For example, mogroside V (Mog.V) has a sweetening capacity that is ˜250 times that of sucrose (Kasai et al., Agric Biol Chem (1989)). Moreover, additional health benefits of mogrosides have been revealed in recent studies (Li et al., Chin J Nat Med (2014)).

[0003] A variety of factors are promoting a surge in interest in research and commercialization of the mogrosides and monkfruit in general, including, for example, the explosion in popularity of and demand for natural sweeteners; the difficulties in scalable sourcing of other promising natural sweeteners such as rebaudioside M (RebM) from the Stevia plant; the superior taste performance of Mog.V relative to other natural and artificial sweetener products on the market; and the medicinal potential of the plant and fruit.

[0004] Purified Mog.V has been approved as a high-intensity sweetening agent in Japan (Jakinovich et al., Journal of Natural Products (1990)) and the extract has gained GRAS status in the USA as a non-nutritive sweetener and flavor enhancer (GRAS 522). Extraction of mogrosides from the fruit can yield a product of varying degrees of purity, often accompanied by undesirable aftertaste. In addition, yields of mogroside from cultivated fruit are limited due to low plant yields and particular cultivation requirements of the plant. Mogrosides are present at about 1% in the fresh fruit and about 4% in the dried fruit (Li H B, et al., 2006). Mog.V is the main component, with a content of 0.5% to 1.4% in the dried fruit. Moreover, purification difficulties limit purity for Mog.V, with commercial products from plant extracts being standardized to about 50% Mog.V. It is highly likely that a pure Mog.V product will achieve greater commercial success than the blend, since it is less likely to have off flavors, will be easier to formulate into products, and has good solubility potential. It is therefore advantageous to be able to produce sweet mogroside compounds via biotechnological processes.

### SUMMARY

[0005] The present invention, in various aspects and embodiments, provides enzymes (including engineered enzymes), microbial strains, and methods for making mogrol and mogrol glycosides (“mogrosides”) using recombinant microbial processes. In other aspects, the invention provides methods for making products, including foods, beverages, and sweeteners (among others), by incorporating the mogrol glycosides produced according to the present disclosure.

[0006] In various aspects, the invention provides microbial strains and methods for making mogrol or mogrol glycoside(s). The invention involves a recombinant microbial host cell expressing a heterologous enzyme pathway catalyzing the conversion of isopentenyl pyrophosphate (IPP) and/or dimethylallyl pyrophosphate (DMAPP) to mogrol or mogrol glycoside(s). The microbial host cell in various embodiments may be prokaryotic (e.g., E. coli) or eukaryotic (e.g., yeast).

[0007] In various embodiments, the heterologous enzyme pathway comprises a farnesyl diphosphate synthase (FPPS) and a squalene synthase (SQS), which are recombinantly expressed. In various embodiments, the SQS comprises an amino acid sequence that is at least 70% identical to an amino acid sequence selected from SEQ ID NOS: 2 to 16, 166, and 167. In some embodiments, the SQS comprises an amino acid sequence that is at least 70% identical to SQS (SEQ ID NO: 11), which has high activity in E. coli.

[0008] In some embodiments, the host cell expresses one or more enzymes that produce mogrol from squalene. For example, the host cell may express one or more squalene epoxidase (SQE) enzymes, one or more triterpenoid cyclases, an epoxide hydrolase (EPH), one or more cytochrome P450 oxidase enzymes (CYP450), a non-heme iron-dependent oxygenases, and a cytochrome P450 reductases (CPR). As shown in FIG. 2, the heterologous pathway can proceed through several routes to mogrol, which may involve one or two epoxidations of the core substrate.

[0009] In some embodiments, the heterologous enzyme pathway comprises two squalene epoxidase (SQE) enzymes. For example, the heterologous enzyme pathway may comprise an SQE that produces 2,3-oxidosqualene. In some embodiments, the SQE will produce 2,3:22,23-dioxidosqualene, and this conversion can be catalyzed by the same SQE enzyme, or an enzyme that differs in amino acid sequence by at least one amino acid modification. For example, the squalene epoxidase enzymes may include at least two SQE enzymes each comprising (independently) an amino acid sequence that is at least 70% identical to any one of SEQ ID NOS: 17 to 39, 168 to 170, and 177 to 183.

[0010] In some embodiments, at least one SQE comprises an amino acid sequence that is at least 70% identical to SEQ ID NO: 39.

[0011] In some embodiments, the host cell comprises two squalene epoxidase enzymes that each comprise an amino acid sequence that is at least 70% identical to squalene epoxidase (SEQ ID NO: 39). For example, one of the SQE enzymes may have one or more amino acid modifications that improve specificity or productivity for conversion of 2,3-oxidosqualene to 2,3:22,23 dioxidosqualene, as compared to the enzyme having the amino acid sequence of SEQ ID NO: 39. In some embodiments, the amino acid modifications comprise one or more modifications at positions corresponding to the following positions of SEQ ID NO: 39: 35, 133, 163, 254, 283, 380, and 395. For example, the amino acid at the position corresponding to position 35 of SEQ ID NO: 39 may be arginine (e.g., H35R). The position corresponding to position 133 of SEQ ID NO 39 may be glycine (e.g., N133G). The amino acid at the position corresponding to position 163 of SEQ ID NO: 39 may be alanine (e.g., F163A). The amino acid at the position corresponding to position 254 of SEQ ID NO: 39 may be phenylalanine (e.g., Y254F). The amino acid at the position corresponding to position 283 of SEQ ID NO: 39 may be leucine (e.g., M283L). The amino acid at the position corresponding to position 380 of SEQ ID NO: 39 may be leucine (e.g., V280L). The amino acid at the position corresponding to position 395 of SEQ ID NO: 39 may be tyrosine (e.g., F395Y).

[0012] In various embodiments, the heterologous enzyme pathway comprises a triterpene cyclase (TTC) enzyme. In some embodiments, where the microbial cell coexpresses FPPS, along with the SQS, SQE, and one or more triterpene cyclase enzymes, the microbial cell produces 2,3;22,23-dioxidosqualene. The 2,3;22,23-dioxidosqualene may be the substrate for downstream enzymes in the heterologous pathway. In some embodiments, the triterpene cyclase (TTC) comprises an amino acid sequence that is at least 70% identical to an amino acid sequence selected from SEQ ID NOS: 40 to 55 and 191 to 193. The TTC in various embodiments comprises an amino acid sequence that is at least 70% identical to the amino acid sequence of SEQ ID NO: 40.

[0013] In various embodiments, the heterologous enzyme pathway comprises at least two copies of a TTC enzyme gene, or comprises at least two enzymes having triterpene cyclase activity and converting 22,23-dioxidosqualene to 24,25-epoxycucurbitadienol. In such embodiments, product can be pulled to 24,25-epoxycucurbitadienol, with less production of cucurbitadienol. In some embodiments, the heterologous enzyme pathway comprises at least one TTC that comprises an amino acid sequence that is at least 70% identical to one of SEQ ID NO: 191, SEQ ID NO: 192, and SEQ ID NO: 193. For example, when co-expressed with SgCDS, these enzymes demonstrated improved production of 24,25-epoxycucurbitadienol compared to expression of SgCDS alone.

[0014] In some embodiments, the heterologous enzyme pathway comprises an epoxide hydrolase (EPH). The EPH may comprise an amino acid sequence that is at least 70% identical to amino acid sequence selected from SEQ ID NOS: 56 to 72, 184 to 190, and 212. In some embodiments, the EPH may employ as a substrate 24,25-epoxycucurbitadienol, for production of 24,25-dihydroxycucurbitadienol

[0015] In some embodiments, the heterologous pathway comprises at least one EPH converting 24,25-epoxycucurbitadienol to 24,25-dihydroxycucurbitadienol, the at least one EPH comprising an amino acid sequence that is at least 70% identical to one of: SEQ ID NO: 189, SEQ ID NO: 58, SEQ ID NO: 184, SEQ ID NO: 185, SEQ ID NO: 187, SEQ ID NO: 188, SEQ ID NO: 190, and SEQ ID NO: 212.

[0016] In some embodiments, the heterologous pathway comprises one or more oxidases. The one or more oxidases may be active on cucurbitadienol or oxygenated products thereof as a substrate, adding (collectively) hydroxylations at C11, C24 and 25, thereby producing mogrol. Alternatively or in addition, the heterologous pathway may comprise one or more oxidases that oxidize C11 of C24,25 dihydroxycucurbitadienol to produce mogrol.

[0017] In some embodiments, at least one oxidase is a cytochrome P450 enzyme. Exemplary cytochrome P450 enzymes comprise an amino acid sequence that is at least 70% identical to an amino acid sequence selected from SEQ ID NOS: 73 to 91, 171 to 176, and 194 to 200.

[0018] In some embodiments, the microbial host cell expresses a heterologous enzyme pathway comprising a P450 enzyme having activity for oxidation at C11 of C24,25 dihydroxycucurbitadienol, to thereby produce mogrol. For example, in some embodiments, the cytochrome P450 comprises an amino acid sequence that is at least 70% identical to an amino acid sequence selected from SEQ ID NO: 194 and SEQ ID NO: 171.

[0019] In various embodiments, the microbial host cell expresses one or more electron transfer proteins selected from a cytochrome P450 reductase (CPR), flavodoxin reductase (FPR) and ferredoxin reductase (FDXR) sufficient to regenerate the one or more oxidases. Exemplary CPR proteins are provided herein as SEQ ID NOS: 92 to 99 and 201.

[0020] In some embodiments, the microbial host cell expresses SEQ ID NO: 194 or a derivative thereof, and SEQ ID NO: 98 or a derivative thereof. In some embodiments, the microbial host cell expresses SEQ ID NO: 171 or a derivative thereof, and SEQ ID NO. 201 or a derivative thereof.

[0021] In some embodiments, the heterologous enzyme pathway further comprises one or more uridine diphosphate-dependent glycosyltransferase (UGT) enzymes, thereby producing one or more mogrol glycosides. The mogrol glycoside may be pentaglycosylated, hexaglycosylated, or more, in some embodiments. In other embodiments, the mogrol glycoside has two, three, or four glucosylations. The one or more mogrol glycosides may be selected from Mog.II-E, Mog.III, Mog.III-A1, Mog.III-A2, Mog.II, Mog.IV, Mog.IV-A, siamenoside, Mog.V, and Mog.VI. In some embodiments, the host cell produces Mog.V or siamenoside.

[0022] In some embodiments, the host cell expresses a UGT enzyme that catalyzes the primary glycosylation of mogrol at C24 and/or C3 hydroxyl groups. In some embodiments, the UGT enzyme catalyzes a branching glycosylation, such as a beta 1,2 and/or beta 1,6 branching glycosylation at the primary C3 and C24 glucosyl groups.

[0023] In some embodiments, at least one UGT enzyme comprises an amino acid sequence that is at least 70% identical to an amino acid sequence selected from SEQ ID NOS: 116 to 165, 202 to 210, 211, and 213 to 218.

[0024] For example, in some embodiments, the microbial cell expresses at least four UGT enzymes, resulting in glucosylation of mogrol at the C3 hydroxyl group, the C24 hydroxyl group, as well as a further 1,6 glucosylation at the C3 glucosyl group, and a further 1,6 glucosylation and a further 1,2 glucosylation at the C24 glucosyl group. The product of such glucosylation reactions is Mog.V.

[0025] In some embodiments, at least one UGT enzyme comprises an amino acid sequence having at least 70% sequence identity to one of SEQ ID NO: 164, 165, 138, 204 to 211, and 213 to 218. In some embodiments, the UGT enzyme is engineered to have higher glycosyltransferase productivity as compared to the wild type enzyme.

[0026] In various embodiments, the microbial strain expresses one or more UGT enzymes capable of primary glycosylation at C24 and/or C3 of mogrol. Exemplary UGT enzymes include UGT enzymes comprising: an amino acid sequence that is at least 70% identical to SEQ ID NO: 165, an amino acid sequence that is at least 70% identical to SEQ ID NO: 146, an amino acid sequence that is at least 70% identical to SEQ ID NO. 202, an amino acid sequence that is at least 70% identical to SEQ ID NO: 202, an amino acid sequence that is at least 70% identical to SEQ ID NO: 129, an amino acid sequence that is at least 70% identical to SEQ ID NO: 116, an amino acid sequence that is at least 70% identical to SEQ ID NO: 218, and amino acid sequence that is at least 70% identical to SEQ ID NO: 217.

[0027] In various embodiments, the microbial strain expresses one or more UGT enzymes capable of catalyzing a branching glycosylation of one or both primary glycosylations. Such UGT enzymes are summarized in Table 2.

[0028] In some embodiments, the microbial host cell has one or more genetic modifications that increase the production of UDP-glucose, the co-factor employed by UGT enzymes.

[0029] Mogrol glycosides can be recovered from the microbial culture. For example, mogrol glycosides may be recovered from microbial cells, or in some embodiments, are predominately available in the extracellular media, where they may be recovered or sequestered.

[0030] Other aspects and embodiments of the invention will be apparent from the following detailed disclosure.

### DESCRIPTION OF THE FIGURES

[0031] FIG. 1 shows the chemical structures of Mog.V, Mog.VI, Isomog.V, and Siamenoside. The type of glycosylation reaction is shown within each glucose moiety (e.g., C3 or C24 core glycosylation and the 1-2, 1-4, or 1-6 glycosylation additions).

[0032] FIG. 2 shows routes to Mog.V production in vivo. The enzymatic transformation required for each step is indicated, along with the type of enzyme required. Numbers in parentheses correspond to the chemical structures in FIG. 3. Abbreviations: FPP, farnesyl pyrophosphate; SQS, squalene synthase; SQE, squalene epoxidase; TTC, triterpene cyclase; EPH, epoxide hydrolase; CYP450, cytochrome P450 with reductase partner, UGTs, uridine diphosphate glycosyltransferases.

[0033] FIG. 3 depicts chemical structures of metabolites involved in Mog.V biosynthesis: (1) farnesyl pyrophosphate; (2) squalene; (3) 2,3-oxidosqualene; (4) 2,3;22,23-dioxidosqualene; (5) 24,25-epoxycucurbitadienol; (6) 24,25-dihydroxycucurbitadienol; (7) mogrol; (8) mogroside V; (9) cucurbitadienol.

[0034] FIG. 4 illustrates glycosylation routes to Mog.V Bubble structures represent different mogrosides. White tetra-cyclic core represents mogrol. The numbers below each structure indicate the particular glycosylated mogroside. Black circles represent C3 or C24 glucosylations. Dark grey vertical circles represent 1,6-glucosylations. Light grey horizontal circles represent 1,2-glucosylations. Abbreviations: Mog, mogrol; sia, siamenoside.

[0035] FIG. 5 shows results for in vivo production of squalene in E. coli using different squalene synthases. The asterisk denotes a different plasmid construct and experiment run on a different day from the others shown. Legend: (1) SgSQS (SEQ ID NO:2), (2) AaSQS (SEQ ID NO: 11), (3) EsSQS (SEQ ID NO: 16), (4) EISQS (SEQ ID NO: 14), (5) FbSQS (SEQ ID NO: 166), (6) BbSQS (SEQ ID NO: 167).

[0036] FIG. 6 shows results for in vivo production of squalene, 2,3-oxidosqualene, and 2,3;22,23-dioxidosqualene using different squalene epoxidases. Legend: (A) SEQ ID NO: 2 and SEQ ID NO: 168; (B) SEQ ID NO: 11 and SEQ ID NO: 168; (C) SEQ ID NO: 2 and SEQ ID NO 169; (D) SEQ ID NO: 11 and SEQ ID NO: 169; (E) SEQ ID NO: 2 and SEQ ID NO: 170; (F) SEQ ID NO: 2 and SEQ ID NO: 39; (G) SEQ ID NO: 11 and SEQ ID NO: 39.

[0037] FIG. 7 shows results for in vivo production of the cyclized triterpene product. Reactions involve an increasing number of enzymes expressed in an E. coli cell line having an overexpression of MEP pathway enzymes. The asterisks represent fermentation experiments incubated for a quarter of the time than the other experiments. As shown, co-expression of SQS (SEQ ID NO: 11), SQE (SEQ ID NO: 39), and TTC (SEQ ID NO: 40) (lane G) resulted in high production of the triterpenoid product, cucurbitadienol. Legends: Product 1 is squalene; Product 2 is 2,3-oxidosqualene; Product 3 is cucurbitadienol; (A) expression of SEQ ID NO: 2, (B) expression of SEQ ID NO. 11, (C) coexpression of SEQ ID NO: 2 and SEQ ID NO: SEQ ID NO: 17, (D) coexpression of SEQ ID NO: 2 and SEQ ID NO: 169; (E) coexpression of SEQ ID NO-11 and SEQ ID NO: 169; (F) coexpression of SEQ ID NO: 2, SEQ ID NO: 17, and SEQ ID NO: 40; (G) coexpression of SEQ ID NO: 11, SEQ ID NO: 39, and SEQ ID NO: 40.

[0038] FIG. 8 shows results for SQE engineering to produce high titers of 2,3;22,23-dioxidosqualene Expression of SQS(SEQ ID NO: 11), SQE (SEQ ID NO: 39), and TTC (SEQ ID NO: 40) whether on a bacterial artificial chromosome (BAC) or integrated, produce large amounts of cucurbitadienol. Point mutations in SQE (SEQ ID NO: 39) were screened to complement SQE to reduce levels of cucurbitadienol, with corresponding gain in titers of 2,3;22,23-dioxidosqualene. Two variants are shown in FIG. 8, SQE A4 (including H35R, F163A, M283L, V380L, and F395Y substitutions, SEQ ID NO: 203) and SQE C11 (including H35R, N133G, F163A, Y254F, V380L, and F395Y substitutions).

[0039] FIG. 9 shows production of 2,3;22,23 dioxidosqualene. Titers are plotted for each strain producing 2,3;22,23 dioxidosqualene. An engineered squalene epoxidase gene, SEQ ID NO: 203, was expressed in a strain producing 2,3 oxidosqualene via the squalene epoxidase of SEQ ID NO: 39. Strains were incubated for 48 hours before extraction. Lanes: (1) expression of SQE of SEQ ID NO: 39; (2) expression of SQE of SEQ ID NO-39 and SEQ ID NO: 203.

[0040] FIG. 10 shows the coexpression of SQS, SQE, and TTC enzymes. CDS of SEQ ID NO: 40, when coexpressed with SQS (SEQ ID NO: 11), SQE (SEQ ID NO: 39), and SQE A4 (SEQ ID NO: 203) in E. coli, resulted in production of cucurbitadienol and 24,25-epoxycucurbitadienol. E. coli strains coexpressing SQS (SEQ ID NO: 11), SQE (SEQ ID NO: 39), SQE A4 (SEQ ID NO: 203), and CDS (SEQ ID NO: 40), with an additional TTC produced higher levels of 24,25-epoxycucurbitadienol. Legend: TTC1 is SEQ ID NO: 92, TTC2 is SEQ ID NO: 191, TTC3 is SEQ ID NO: 193, TTC4 is SEQ ID NO: 40.

[0041] FIG. 11 shows production of cucurbitadienol and 24,25-epoxycucurbitadienol. E. coli strains producing oxidosqualene and dioxidosqualene were complemented with CDS homologs and CAS genes engineered to produce cucurbitadienol. The ratio of 24,25-epoxycucurbitadienol to cucurbitadienol varies from 0.15 for Enzyme 1 (SEQ ID NO: 40) to 0.58 for Enzyme 2 (SEQ ID NO: 192), demonstrating improved substrate specificity toward the desired 24,25-epoxycucurbitadienol product for Enzyme 2. Enzyme 3 is SEQ ID NO: 219, and Enzyme 4 is SEQ ID NO: 220.

[0042] FIG. 12 shows the screening of EPH enzymes for hydration of 24,25-epoxycucurbitadienol to produce 24,25-dihydroxycucurbitadienol in E. coli strains coexpressing SQS (SEQ ID NO: 11), SQE (SEQ ID NO: 39), SQE A4 (SEQ ID NO. 203), and TTC (SEQ ID NO: 40). These fermentation experiments were performed at 30° C. for 72 hours in 96 well plates. Legend: EPH1 (SEQ ID NO: 186); EPH2 (SEQ ID NO: 212); EPH3 (SEQ ID NO: 190); EPH4 (SEQ ID NO: 187); EPH5 (SEQ ID NO: 184); EPH6 (SEQ ID NO: 185); EPH7 (SEQ ID NO: 188); EPH8 (SEQ ID NO: 189); and EPH9 (SEQ ID NO: 58).

[0043] FIG. 13(A-C) show the coexpression of SQS, SQE, TTC, EPH, and P450 enzymes to produce mogrol. An E. coli strain expressing SEQ ID NOS: 11, 39, 203 along with CDS, EPH, and P450 genes with a CPR resulted in production of mogrol and oxo-mogrol (FIG. 13A). These fermentation experiments were performed at 30° C. for 72 hours in 96 well plates. Mogrol production was validated by LC-QQQ mass spectrum analysis with a spiked authentic standard (FIG. 13B) and GC-FID chromatography versus an authentic standard (FIG. 13C). Legend: (1) coexpression of SEQ ID NO: 40, SEQ ID NO: 58, SEQ ID NO: 194), and SEQ ID NO: 98); (2) coexpression of SEQ ID NO. 40, SEQ ID NO. 58, SEQ ID NO: 197, and SEQ ID NO: 98; (3) SEQ ID NO: 40, SEQ ID NO: 58, SEQ ID NO: 171, and SEQ ID NO: 201.

[0044] FIG. 14 shows the screening of cytochrome P450s for oxidation at C11 of the 24,25-dihydroxycucurbitadienol-like molecule cucurbitadienol. Native anchor P450 enzymes shown are: (1) SEQ ID NO: 194, (2) SEQ ID NO: 197, (3) SEQ ID NO: 171, (4) SEQ ID NO: 74), and (5) SEQ ID NO: SEQ ID NO: 75. In some cases, the native transmembrane domain was replaced with the transmembrane domain from E. coli sohB (Anchor 3). E. coli zipA (Anchor 2), or bovine 17a (Anchor 1) to improve interaction with the E. coli membrane. Each P450 was coexpressed with either CPR SEQ ID NO: 98 or CPR (SEQ ID NO: 201), resulting in production of 11-hydroxycucurbitadienol. These fermentation experiments were performed at 30° C. for 72 hours in 96 well plates.

[0045] FIG. 15 shows production of products with oxidation at C11.

[0046] FIG. 16 shows Mog.V production using a combination of different enzymes. (A) Penta-glycosylated products are observed when UGTs of SEQ ID NO: 165, SEQ ID NO. 146, SEQ ID NO: 117, or SEQ ID NO: 164 are incubated together with mogrol as a substrate. Strains: (1) expresses SEQ ID NO: 165, (2) expresses SEQ ID NO: 146, (3) co-expresses SEQ ID NO: 165 and SEQ ID NO: 146, (4) co-expresses SEQ ID NO: 165, SEQ ID NO: 146, and SEQ ID NO: 117, (5) co-expresses SEQ ID NO. 165, SEQ ID NO. 146, SEQ ID NO. 117, and SEQ ID NO: 164. Mogroside substrates were incubated in Tris buffer containing magnesium chloride, beta-mercaptoethanol, UDP-glucose, single UGT, and a phosphatase. (B) Extracted ion chromatogram (EIC) for 1285.4 Da (mogroside V+H) of reactions containing SEQ ID NO: 165 and SEQ ID NO: 146, and either Enzyme 1 (SEQ ID NO: 117) or Enzyme 2 (SEQ ID NO: 164) when incubated with Mog.II-E. (C) Extracted ion chromatogram (EIC) for 1285.4 Da (mogroside V+H) of reactions containing SEQ ID NO: 165 and SEQ ID NO: 146 and either Enzyme 1 (SEQ ID NO: 117) or Enzyme 2 (SEQ ID NO: 164) when incubated with mogrol. Abbreviation: MogV, mogroside V.

[0047] FIG. 17 shows in vitro assays showing the conversion of mogroside substrates to more glycosylated products. Mogroside substrates were incubated in Tris buffer containing magnesium chloride, beta-mercaptoethanol, UDP-glucose, single UGT, and a phosphatase. The panels correspond to the use of different substrates: (A) mogrol; (B) Mog.I-A; (C) Mog.I-E; (D) Mog.II-E; (E) Mog.III; (F) Mog.IV-A; (G) Mog.IV; (H) siamenoside. Enzyme 1 (SEQ ID NO: 165), Enzyme 2 (SEQ ID NO: 146), Enzyme 3 (SEQ ID NO: 116), Enzyme 4 (SEQ ID NO: 117), and Enzyme 5 (SEQ ID NO: 164).

[0048] FIG. 18 shows the bioconversion of mogrol into mogroside-IA or mogroside-IIE. In the experiment, engineered E. coli strains were inoculated with 0.2 mM mogrol at 37° C. Product formation was examined after 48 hours. The values are reported relative to the empty vector control (the values reported are the detected compound minus the background level detected in the empty vector control). Products were measured on LC/MS-QQQ with authentic standards. Only Enzyme 1 shows formation of mogroside-HE. Enzyme 1 to 5 are SEQ ID NOS: 202, 116, 216, 217, and 218 respectively.

[0049] FIG. 19A and FIG. 19B shows the bioconversion of Mog.IA (FIG. 19A) or Mog.IE (FIG. 18B) into Mog.IIE. Engineered E. coli strains (expressing either Enzyme 1, SEQ ID NO: 165; Enzyme 2, SEQ ID NO: 202; or Enzyme 3, SEQ ID NO: 116) were grown at 37° C. in fermentation media containing 0.2 mM Mog.IA (FIG. 19A) or Mog.IE (FIG. 19B). Product formation was measured after 48 hours using LC-MS/MS with authentic standards. Reported values are those in excess of the empty vector control.

[0050] FIG. 20 shows the production of Mog.III or siamenoside from Mog.II-E by engineered E. coli strains expressing Enzyme 1 (SEQ ID NO: 204), Enzyme 2 (SEQ ID NO: 138), or Enzyme 3 (SEQ ID NO: 206). Strains were grown at 37° C. in fermentation media containing 0.2 mM Mog.IA, and product formation was measured after 48 hours using LC-MS/MS with authentic standards.

[0051] FIG. 21 shows the in vitro production of Mog.IIA2 by cells expressing Enzyme 1 (SEQ ID NO: 205). 0.1 mM Mog.I-E was added, and reactions were incubated at 37° C. for 48 hr. Data was quantified by LC MS/MS with authentic standards of each compound.

[0052] FIG. 22(A,B) shows production of Mog.V in E. coli. (A) Chromatogram indicating Mog.V production from engineered E. coli strains expressing SEQ ID NO: 11, SEQ ID NO: 39, SEQ ID NO: 203, SEQ ID NO: 40, SEQ ID NO: 189, SEQ ID NO: 199, SEQ ID NO: 202, SEQ ID NO: 165, and SEQ ID NO: 122. Strains were incubated at 30° C. for 72 hours before extraction. Mog.V production was verified by LC-QQQ spectrum analysis versus an authentic standard. (B) Chromatogram indicating Mog.V production from a biological sample with a spiked Mog.V authentic standard.

[0053] FIG. 23 shows bioconversion of mogroside-HE to further glycosylated products using an engineered version of the UGT enzyme of SEQ ID NO. 164.

[0054] FIG. 24 shows bioconversion of Mog.IA to Mog. IE with an engineered version of the UGT enzyme of SEQ ID NO: 165.

[0055] FIG. 25 shows bioconversion of Mog.IE to Mog.IIE with an engineered version of the UGT enzyme of SEQ ID NO: 217.

[0056] FIG. 26 is an amino acid alignment of CaUGT_1,6 and SgUGT94_289_3 using Clustal Omega (Version CLUSTAL O (1,2,4). These sequences share 54% amino acid identity.

[0057] FIG. 27 is an amino acid alignment of Homo sapiens squalene synthase (HsSQS) (NCBI accession NP_004453.3) and AaSQS (SEQ ID NO: 11) using Clustal Omega (Version CLUSTAL O (1.2.4)). HsSQS has a published crystal structure (PDB entry: 1EZF). These sequences share 42% amino acid identity.

[0058] FIG. 28 is an amino acid alignment of Homo sapiens squalene epoxidase (HsSQE) (NCBI accession XP_011515548) and MlSQE (SEQ ID NO: 39) using Clustal Omega (Version CLUSTAL O (1.2.4)). HsSQE has a published crystal structure (PDB entry: 6C6N). These sequences share 35% amino acid identity.

### DETAILED DESCRIPTION OF THE INVENTION

[0059] The present invention, in various aspects and embodiments, provides microbial strains and methods for making mogrol and mogrol glycosides, using recombinant microbial processes. In other aspects, the invention provides methods for making products, including foods, beverages, and sweeteners (among others), by incorporating the mogrol glycosides produced according to the methods described herein. In still other aspects, the invention provides engineered UGT enzymes for glycosylating secondary metabolite substrates, such as mogrol or mogrosides.

[0060] As used herein, the terms “terpene or triterpene” are used interchangeably with the terms “terpenoid” or “triterpenoid,” respectively.

[0061] In various aspects, the invention provides microbial strains and methods for making the triterpenoid compound mogrol, or glycoside products thereof. The invention provides a recombinant microbial host cell expressing a heterologous enzyme pathway catalyzing the conversion of isopentenyl pyrophosphate (IPP) and/or dimethylallyl pyrophosphate (DMAPP) to one or more of mogrol or mogroside(s).

[0062] The microbial host cell in various embodiments may be prokaryotic or eukaryotic. In some embodiments, the microbial host cell is a bacterium, and which can be optionally selected from Escherichia spp., Bacillus spp., Corynebacterium spp., Rhodobacter spp., Zymomonas spp., Vibrio spp., and Pseudomonas spp. For example, in some embodiments, the bacterial host cell is a species selected from Escherichia coli, Bacillus subtilis, Corynebacterium glutamicum, Rhodobacter capsulatus, Rhodobacter sphaeroides, Zymomonas mobilis, Vibrio natriegens, or Pseudomonas putida. In some embodiments, the bacterial host cell is E. coli. Alternatively, the microbial cell may be a yeast cell, such as but not limited to a species of Saccharomyces, Pichia, or Yarrowia, including Saccharomyces cerevisiae, Pichia pastoris, and Yarrowia lipolytica.

[0063] The microbial cell will produce MEP or MVA products, which act as substrates for the heterologous enzyme pathway. The MEP (2-C-methyl-D-erythritol 4-phosphate) pathway, also called the MEP/DOXP (2-C-methyl-D-erythritol 4-phosphate/l-deoxy-D-xylulose 5-phosphate) pathway or the non-mevalonate pathway or the mevalonic acid-independent pathway refers to the pathway that converts glyceraldehyde-3-phosphate and pyruvate to IPP and DMAPP. The pathway, which is present in bacteria, typically involves action of the following enzymes: 1-deoxy-D-xylulose-5-phosphate synthase (Dxs), 1-deoxy-D-xylulose-5-phosphate reductoisomerase (IspC), 4-diphosphocytidyl-2-C-methyl-D-erythritol synthase (IspD), 4-diphosphocytidyl-2-C-methyl-D-erythritol kinase (IspE), 2C-methyl-D-erythritol 2,4-cyclodiphosphate synthase (IspF), 1-hydroxy-2-methyl-2-(E)-butenyl 4-diphosphate synthase (IspG), and isopentenyl diphosphate isomerase (IspH). The MEP pathway, and the genes and enzymes that make up the MEP pathway, are described in U.S. Pat. No. 8,512,988, which is hereby incorporated by reference in its entirety. For example, genes that make up the MEP pathway include dxs, ispC, ispD, ispE, ispF, ispG, ispH, idi, and ispA. In some embodiments, the host cell expresses or overexpresses one or more of dxs, ispC, ispD, ispE, ispF, ispG, ispH, idi, ispA, or modified variants thereof, which results in the increased production of IPP and DMAPP. In some embodiments, the triterpenoid (e.g., squalene, mogrol, or other intermediate described herein) is produced at least in part by metabolic flux through an MEP pathway, and wherein the host cell has at least one additional gene copy of one or more of dxs, ispC, ispD, ispE, ispF, ispG, ispH, idi, ispA, or modified variants thereof.

[0064] The MVA pathway refers to the biosynthetic pathway that converts acetyl-CoA to IPP. The mevalonate pathway, which will be present in yeast, typically comprises enzymes that catalyze the following steps: (a) condensing two molecules of acetyl-CoA to acetoacetyl-CoA (e.g., by action of acetoacetyl-CoA thiolase); (b) condensing acetoacetyl-CoA with acetyl-CoA to form hydroxymethylglutaryl-CoenzymeA (HMG-CoA) (e.g., by action of HMG-CoA synthase (HMGS)); (c) converting HMG-CoA to mevalonate (e.g., by action of HMG-CoA reductase (HMGR)); (d) phosphorylating mevalonate to mevalonate 5-phosphate (e.g., by action of mevalonate kinase (MK)); (e) converting mevalonate 5-phosphate to mevalonate 5-pyrophosphate (e.g., by action of phosphomevalonate kinase (PMK)); and (f) converting mevalonate 5-pyrophosphate to isopentenyl pyrophosphate (e.g., by action of mevalonate pyrophosphate decarboxylase (MPD)). The MVA pathway, and the genes and enzymes that make up the MVA pathway, are described in U.S. Pat. No. 7,667,017, which is hereby incorporated by reference in its entirety. In some embodiments, the host cell expresses or overexpresses one or more of acetoacetyl-CoA thiolase, HMGS, HMGR, MK, PMK, and MPD or modified variants thereof, which results in the increased production of IPP and DMAPP. In some embodiments, the triterpenoid (e.g., mogrol or squalene) is produced at least in part by metabolic flux through an MVA pathway, and wherein the host cell has at least one additional gene copy of one or more of acetoacetyl-CoA thiolase, HMGS, HMGR, MK, PMK, MPD, or modified variants thereof.

[0065] In some embodiments, the host cell is a bacterial host cell engineered to increase production of IPP and DMAPP from glucose as described in U.S. Pat. Nos. 10,480,015 and 10,662,442, the contents of which are hereby incorporated by reference in their entireties. For example, in some embodiments the host cell overexpresses MEP pathway enzymes, with balanced expression to push/pull carbon flux to IPP and DMAP. In some embodiments, the host cell is engineered to increase the availability or activity of Fe—S cluster proteins, so as to support higher activity of IspG and IspH, which are Fe—S enzymes. In some embodiments, the host cell is engineered to overexpress IspG and IspH, so as to provide increased carbon flux to 1-hydroxy-2-methyl-2-(E)-butenyl 4-diphosphate (HMBPP) intermediate, but with balanced expression to prevent accumulation of HMBPP at an amount that reduces cell growth or viability, or at an amount that inhibits MEP pathway flux and/or terpenoid production. In some embodiments, the host cell exhibits higher activity of IspH relative to IspG. In some embodiments, the host cell is engineered to downregulate the ubiquinone biosynthesis pathway, e.g., by reducing the expression or activity of IspB, which uses IPP and FPP substrate.

[0066] In various embodiments, the heterologous enzyme pathway comprises a farnesyl diphosphate synthase (FPPS) and a squalene synthase (SQS), which are recombinantly expressed. In various embodiments, the SQS comprises an amino acid sequence that is at least 70% identical to an amino acid sequence selected from SEQ ID NOS: 2 to 16, 166, and 167.

[0067] By way of non-limiting example, the FPPS may be Saccharomyces cerevisiae farnesyl pyrophosphate synthase (ScFPPS)(SEQ ID NO: 1), or modified variants thereof. Modified variants may comprise an amino acid sequence that is at least 70% identical to SEQ ID NO: 1). For example, the FPPS may comprise an amino acid sequence that is at least 80%, or at least 85%, or at least 90%, or at least 95%, or at least 98%, or at least 99% identical to SEQ ID NO: 1. In some embodiments, the FPPS comprises an amino acid sequence having from 1 to 20 amino acid modifications or having from 1 to 10 amino acid modifications with respect to SEQ ID NO: 1, the amino acid modifications being independently selected from amino acid substitutions, deletions, and insertions. Numerous other FPPS enzymes are known in the art, and may be employed for conversion of IPP and/or DMAPP to farnesyl diphosphate in accordance with this aspect.

[0068] In some embodiments, the SQS comprises an amino acid sequence that is at least 70% identical to SEQ ID NO: 11. For example, the SQS may comprise an amino acid sequence that is at least 80%, or at least 85%, or at least 90%, or at least 95%, or at least 98%, or at least 99% identical to SEQ ID NO: 11. In some embodiments, the SQS comprises an amino acid sequence having from 1 to 20 amino acid modifications or from 1 to 10 amino acid modifications with respect to SEQ ID NO: 11, the amino acid modifications being independently selected from amino acid substitutions, deletions, and insertions. Amino acid modifications may be made to increase expression or stability of the enzyme in the microbial cell, or to increase productivity of the enzyme. As shown in FIG. 5, AaSQS has high activity in E. coli.

[0069] In some embodiments, the SQS comprises an amino acid sequence that is at least 70% identical to SEQ ID NO: 2. For example, the SQS may comprise an amino acid sequence that is at least 80%, or at least 85%, or at least 90%, or at least 95%, or at least 98%, or at least 99% identical to SEQ ID NO: 2. In some embodiments, the SQS comprises an amino acid sequence having from 1 to 20 amino acid modifications or from 1 to 10 amino acid modifications with respect to SEQ ID NO: 2, the amino acid modifications being independently selected from amino acid substitutions, deletions, and insertions. Amino acid modifications may be made to increase expression or stability of the enzyme in the microbial cell, or to increase productivity of the enzyme. As shown in FIG. 5, SgSQS has high activity in E. coli.

[0070] In some embodiments, the SQS comprises an amino acid sequence that is at least 70% identical to SEQ ID NO: 14. For example, the SQS may comprise an amino acid sequence that is at least 80%, or at least 85%, or at least 90%, or at least 95%, or at least 98%, or at least 99% identical to SEQ ID NO: 14. In some embodiments, the SQS comprises an amino acid sequence having from 1 to 20 amino acid modifications or from 1 to 10 amino acid modifications with respect to SEQ ID NO: 14, the amino acid modifications being independently selected from amino acid substitutions, deletions, and insertions. Amino acid modifications may be made to increase expression or stability of the enzyme in the microbial cell, or to increase productivity of the enzyme. As shown in FIG. 5, EISQS was active in E. coli.

[0071] In some embodiments, the SQS comprises an amino acid sequence that is at least 70% identical to SEQ ID NO: 16. For example, the SQS may comprise an amino acid sequence that is at least 80%, or at least 85%, or at least 90%, or at least 95%, or at least 98%, or at least 99% identical to SEQ ID NO: 16. In some embodiments, the SQS comprises an amino acid sequence having from 1 to 20 amino acid modifications or from 1 to 10 amino acid modifications with respect to SEQ ID NO: 16, the amino acid modifications being independently selected from amino acid substitutions, deletions, and insertions. Amino acid modifications may be made to increase expression or stability of the enzyme in the microbial cell, or to increase productivity of the enzyme. As shown in FIG. 5, EsSQS was active in E. coli.

[0072] In some embodiments, the SQS comprises an amino acid sequence that is at least 70% identical to SEQ ID NO: 166. For example, the SQS may comprise an amino acid sequence that is at least 80%, or at least 85%, or at least 90%, or at least 95%, or at least 98%, or at least 99% identical to SEQ ID NO: 166. In some embodiments, the SQS comprises an amino acid sequence having from 1 to 20 amino acid modifications or from 1 to 10 amino acid modifications with respect to SEQ ID NO: 166, the amino acid modifications being independently selected from amino acid substitutions, deletions, and insertions. Amino acid modifications may be made to increase expression or stability of the enzyme in the microbial cell, or to increase productivity of the enzyme. As shown in FIG. 5, FbSQS was active in E. coli.

[0073] In some embodiments, the SQS comprises an amino acid sequence that is at least 70% identical to SEQ ID NO: 167. For example, the SQS may comprise an amino acid sequence that is at least 80%, or at least 85%, or at least 90%, or at least 95%, or at least 98%, or at least 99% identical to SEQ ID NO: 167. In some embodiments, the SQS comprises an amino acid sequence having from 1 to 20 amino acid modifications or from 1 to 10 amino acid modifications with respect to SEQ ID NO: 167, the amino acid modifications being independently selected from amino acid substitutions, deletions, and insertions. Amino acid modifications may be made to increase expression or stability of the enzyme in the microbial cell, or to increase productivity of the enzyme. As shown in FIG. 5, BbSQS was active in E. coli.

[0074] Amino acid modifications to the SQS enzyme can be guided by available enzyme structures and homology models, including those described in Aminfar and Tohidfar, In silico analysis of squalene synthase in Fabaceae family using bioinformatics tools, J. Genetic Engineer. and Biotech. 16 (2018) 739-747. The publicly available crystal structure for HsSQE (PDB entry: 6C6N) may be used to inform amino acid modifications. An alignment between AaSQS and HsSQS is shown in FIG. 27. The enzymes have 42% amino acid identity.

[0075] In some embodiments, the host cell expresses one or more enzymes that produce mogrol from squalene. For example, the host cell may express one or more squalene epoxidase (SQE) enzymes, one or more triterpenoid cyclases, one or more epoxide hydrolase (EPH) enzymes, one or more cytochrome P450 oxidases (CYP450), optionally one or more non-heme iron-dependent oxygenases, and one or more cytochrome P450 reductases (CPR). As shown in FIG. 2, the heterologous pathway can proceed through several routes to mogrol, which may involve one or two epoxidations of the core substrate. In some embodiments, the pathway proceeds through cucurbitadienol, and in some embodiments, does not involve a further epoxidation step. In some embodiments, cucurbitadienol intermediate is converted to 24,25-epoxycucurbitadienol (5) by one or or more epoxidase enzymes (such as that provided herein as SEQ ID NO: 221). In still other embodiments, the pathway largely proceeds through 2,3;24,25-dioxidosqualene, with only small or minimal production of cucurbitadienol intermediate. In some embodiments, one or more of SQE, CDS, EPH, CYP450, non-heme iron-dependent oxygenases, flavodoxin reductases (FPR), ferredoxin reductases (FDXR), and CPR enzymes are engineered to increase flux to mogrol.

[0076] In some embodiments, the heterologous enzyme pathway comprises two squalene epoxidase (SQE) enzymes. For example, the heterologous enzyme pathway may comprise an SQE that produces 2,3-oxidosqualene (intermediate (3) in FIG. 2). In some embodiments, the SQE will produce 2,3;22,23-dioxidosqualene (intermediate (4) in FIG. 2), and this conversion can be catalyzed by the same SQE enzyme, or an enzyme that differs in amino acid sequence by at least one amino acid modification. For example, the squalene epoxidase enzymes may include at least two SQE enzymes each comprising (independently) an amino acid sequence that is at least 70% identical to any one of SEQ ID NOS: 17 to 39, 168 to 170, and 177 to 183. By coexpression of an SQE enzyme engineered or screened for substrate specificity for 2,3-oxidosqualene, the di-epoxy intermediate can be produced, with low or minimal levels of cucurbitadienol. In these embodiments, P450 oxygenase enzymes hydroxylating C24 and C25 of the scaffold can be eliminated.

[0077] In some embodiments, the at least one SQE comprises an amino acid sequence that is at least 70%, or at least 80%, or at least 85%, or at least 90%, or at least 95%, or at least 98%, or at least 99% identical to SEQ ID NO: 39. For example, the SQE enzyme may comprise an amino acid sequence having from 1 to 20 amino acid modifications with respect to SEQ ID NO: 39, the amino acid modifications being independently selected from amino acid substitutions, deletions, and insertions.

[0078] As shown in FIG. 6, MlSQE has high activity in E. coli, particularly when coexpressed with AaSQS, where high levels of the single epoxylated product (2,3-oxidosqualene) were observed. Accordingly, coexpression of AaSQS (or an engineered derivative) with multiple copies of MlSQE engineered as described above, has good potential for bioengineering of the mogrol pathway. See FIG. 9. Amino acid modifications may be made to increase expression or stability of the SQE enzyme in the microbial cell, or to increase productivity of the enzyme.

[0079] In some embodiments, the host cell comprises two squalene epoxidase enzymes that each comprise an amino acid sequence that is at least 70% identical to Methylomonas lenta squalene epoxidase (SEQ ID NO: 39). For example, one of the SQE enzymes may have one or more amino acid modifications that improve specificity or productivity for conversion of 2,3-oxidosqualene to 2,3;22,23 dioxidosqualene, as compared to the enzyme having the amino acid sequence of SEQ ID NO: 39. In some embodiments, the amino acid modifications comprise one or more (or in some embodiments, 2, 3, 4, 5, 6, or 7) modifications at positions corresponding to the following positions of SEQ ID NO-39: 35, 133, 163, 254, 283, 380, and 395. For example, the amino acid at the position corresponding to position 35 of SEQ ID NO: 39 may be arginine or lysine (e.g., H35R). The position corresponding to position 133 of SEQ ID NO: 39 may be glycine, alanine, leucine, isoleucine, or valine (e.g., N133G). The amino acid at the position corresponding to position 163 of SEQ ID NO: 39 may be glycine, alanine, leucine, isoleucine, or valine (e.g., F163A). The amino acid at the position corresponding to position 254 of SEQ ID NO. 39 may be phenylalanine, alanine, leucine, isoleucine, or valine (e.g., Y254F). The amino acid at the position corresponding to position 283 of SEQ ID NO: 39 may be alanine, leucine, isoleucine, or valine (e.g., M283L). The amino acid at the position corresponding to position 380 of SEQ ID NO: 39 may be alanine, leucine, or glycine (e.g., V280L). The amino acid at the position corresponding to position 395 of SEQ ID NO 39 may be tyrosine, serine, or threonine (e.g., F395Y). Exemplary SQE enzymes in these embodiments are at least 70%, or at least 80%, or at least 90%, or at least 95% identical to SEQ ID NO: 39, but comprise the following sets of amino acid substitutions. H35R, F163A, M283L, V380L, F395Y; or H35R, N133G, F163A, Y254F, V380L, and F395Y, in each case numbered according to SEQ ID NO: 39. For example, the host cell may express an SQE comprising the amino acid sequence of SEQ. ID NO: 203 (referred to herein as MlSQE A4).

[0080] In still other embodiments, the squalene epoxidase comprises an amino acid sequence that is at least 70% identical to SEQ ID NO: 168). For example, the SQE may comprise an amino acid sequence that is at least 80%, or at least 85%, or at least 90%, or at least 95%, or at least 98%, or at least 99%/o identical to SEQ ID NO: 168. In various embodiments, the SQE comprises an amino acid sequence having from 1 to 20 amino acid modifications or from 1 to 10 amino acid modifications with respect to SEQ ID NO. 168, the amino acid modifications being independently selected from amino acid substitutions, deletions, and insertions. As shown in FIG. 6, BaESQE had good activity in E. coli. Amino acid modifications may be made to increase expression or stability of the enzyme in the microbial cell, or to increase productivity of the enzyme.

[0081] In some embodiments, the squalene epoxidase comprises an amino acid sequence that is at least 70% identical to SEQ ID NO: 169. For example, the SQE may comprise an amino acid sequence that is at least 80%, or at least 85%, or at least 90%, or at least 95%, or at least 98%, or at least 99% identical to SEQ ID NO: 169. In various embodiments, the SQE comprises an amino acid sequence having from 1 to 20 amino acid modifications or from 1 to 10 amino acid modifications with respect to SEQ ID NO. 169, the amino acid modifications being independently selected from amino acid substitutions, deletions, and insertions. As shown in FIG. 6, MsSQE had good activity in E. coli. Amino acid modifications may be made to increase expression or stability of the enzyme in the microbial cell, or to increase productivity of the enzyme.

[0082] In some embodiments, the squalene epoxidase comprises an amino acid sequence that is at least 70% identical to SEQ ID NO: 170. For example, the SQE may comprise an amino acid sequence that is at least 80%, or at least 85%, or at least 90%, or at least 95%, or at least 98%, or at least 99% identical to SEQ ID NO: 170. In various embodiments, the SQE comprises an amino acid sequence having from 1 to 20 amino acid modifications or from 1 to 10 amino acid modifications with respect to SEQ ID NO: 170, the amino acid modifications being independently selected from amino acid substitutions, deletions, and insertions. As shown in FIG. 6, MbSQE had good activity in E. coli. Amino acid modifications may be made to increase expression or stability of the enzyme in the microbial cell, or to increase productivity of the enzyme.

[0083] Amino acid modifications can be guided by available enzyme structures and homology models, including those described in Padyana A K, et al., Structure and inhibition mechanism of the catalytic domain of human squalene epoxidase, Nat. Comm. (2019) Vol. 10(97): 1-10; or Ruckenstulh et al., Structure-Function Correlations of Two Highly Conserved Motifs in Saccharomyces cerevisiae Squalene Epoxidase, Antimicrob. Agents and Chemo. (2008) Vol. 52(4): 1496-1499. FIG. 28 shows an alignment of HsSQE and MlSQE, which is useful for guiding engineering of the enzymes for expression, stability, and productivity in microbial host cells. The two enzymes have 35% identity.

[0084] In various embodiments, the heterologous enzyme pathway comprises a triterpene cyclase (TTC). In some embodiments, where the microbial cell coexpresses FPPS, along with the SQS, SQE, and triterpene cyclase enzymes, the microbial cell produces 2,3;22,23-dioxidosqualene. The 2,3;22,23-dioxidosqualene may be the substrate for downstream enzymes in the heterologous pathway. In some embodiments, the triterpene cyclase (TTC) comprises an amino acid sequence that is at least 70%, or at least 80%, or at least 90%, or at least 95% identical to an amino acid sequence selected from SEQ ID NOS: 40 to 55, 191 to 193, and 219 to 220. The TTC in various embodiments comprises an amino acid sequence that is at least 70% identical to the amino acid sequence of SEQ ID NO: 40. In some embodiments, the TTC comprises an amino acid sequence that is at least 80%, or at least 85%, or at least 900%, or at least 95%, or at least 98%, or at least 99%/o identical to SEQ ID NO: 40. For example, the TTC may comprise an amino acid sequence having from 1 to 20 amino acid modifications with respect to SEQ ID NO: 40, the amino acid modifications being independently selected from amino acid substitutions, deletions, and insertions.

[0085] In some embodiments, the TTC comprises an amino acid sequence that is at least 80%, or at least 85%, or at least 90%, or at least 95%, or at least 98%, or at least 99% identical to SEQ ID NO: 192. For example, the TTC may comprise an amino acid sequence having from 1 to 20 amino acid modifications with respect to SEQ ID NO: 192, the amino acid modifications being independently selected from amino acid substitutions, deletions, and insertions. The enzyme defined by SEQ ID NO: 192 shows improved specificity toward production of 24,25-epoxycucurbitadienol (FIG. 11).

[0086] In various embodiments, the heterologous enzyme pathway comprises at least two copies of a TTC enzyme gene, or comprises at least two enzymes having triterpene cyclase activity and converting 22,23-dioxidosqualene to 24,25-epoxycucurbitadienol. In such embodiments, product can be pulled to 24,25-epoxycucurbitadienol, with less production of cucurbitadienol.

[0087] In some embodiments, the heterologous enzyme pathway comprises at least one TTC that comprises an amino acid sequence that is at least 70% identical to one of SEQ ID NO: 191, SEQ ID NO: 192, and SEQ ID NO. 193. These enzymes may be optionally co-expressed with SgCDS. These enzymes exhibit high production of 24,25-epoxycucurbitadienol. FIG. 10. Thus, in some embodiments, at least one TTC comprises an amino acid sequence that is at least 80%, or at least 85%, or at least 90%, or at least 95%, or at least 98%, or at least 99% identical to one of SEQ ID NOS: 191, 192, and 193. In some embodiments, the TTC comprises an amino acid sequence having from 1 to 20 amino acid modifications with respect to one of SEQ ID NOS: 191, 192, and 193, the amino acid modifications being independently selected from amino acid substitutions, deletions, and insertions.

[0088] Amino acid modifications may be made to increase expression or stability of the enzyme in the microbial cell, or to increase productivity of the enzyme. Amino acid modifications can be guided by available enzyme structures and homology models, including those described in Itkin M., et al., The biosynthetic pathway of the nonsugar, high-intensity sweetener mogroside V from Siraitia grosvenorii, PNAS (2016) Vol 113(47): E7619-E7628. For example, the CDS may be modeled using the structure of human lanosterol synthase (oxidosqualene cyclase) (PDB 1W6K).

[0089] In various embodiments, cucurbitadienol (intermediate 9 in FIG. 2) is converted to 24,25-epoxycucurbitadienol (5) by one of more enzymes expressed in the host cell. For example, the heterologous pathway may comprise an enzyme having at least about 70%, or at least about 80%, or at least about 85%, or at least about 90%, or at least about 95%, or at least about 97%, 98%, or 99% sequence identity with SEQ ID NO: 221.

[0090] In some embodiments, the heterologous enzyme pathway comprises at least one epoxide hydrolase (EPH). The EPH may comprise an amino acid sequence that is at least 70% identical to amino acid sequence selected from SEQ ID NOS: 56 to 72, 184 to 190, and 212. In some embodiments, the EPH may employ as a substrate 24,25-epoxycucurbitadienol (intermediate (5) of FIG. 2), for production of 24,25-dihydroxycucurbitadienol (intermediate (6) of FIG. 2). In some embodiments, the EPH comprises an amino acid sequence that is at least 80%, or at least 85%, or at least 90%, or at least 95%, or at least 98%, or at least 99% identical to one of SEQ ID NOS: 56 to 72, 184 to 190, and 212. Thus, in some embodiments, the EPH comprises an amino acid sequence having from 1 to 20 amino acid modifications with respect to one of SEQ ID NOS: 56 to 72, 184 to 190, and 212, the amino acid modifications being independently selected from amino acid substitutions, deletions, and insertions.

[0091] In some embodiments, the heterologous pathway comprises at least one EPH enzyme converting 24,25-epoxycucurbitadienol to 24,25-dihydroxycucurbitadienol, the at least one EPH enzyme comprising an amino acid sequence that is at least 70% identical to one of: SEQ ID NO: 189, SEQ ID NO: 58, SEQ ID NO: 184, SEQ ID NO: 185, SEQ ID NO: 187, SEQ ID NO: 188, SEQ ID NO: 190, and SEQ ID NO: 212. See FIG. 12. In some embodiments, the EPH enzyme comprises an amino acid sequence that is at least 80%, or at least 85%, or at least 90%, or at least 95%, or at least 98%, or at least 99% identical to one of SEQ ID NOS: 189, 58, 184, 185, 187, 188, 190, and 212. For example, the EPH may comprise an amino acid sequence having from 1 to 20 amino acid modifications with respect to one of SEQ ID NOS: 189, 58, 184, 185, 187, 188, 190, and 212, the amino acid modifications being independently selected from amino acid substitutions, deletions, and insertions. Amino acid modifications may be made to increase expression or stability of the enzyme in the microbial cell, or to increase productivity of the enzyme.

[0092] In some embodiments, the heterologous pathway comprises one or more oxidases. The one or more oxidases may be active on cucurbitadienol or oxygenated products thereof as a substrate, adding (collectively) hydroxylations at C11, C24 and 25, thereby producing mogrol (see FIG. 2). Alternatively, the heterologous pathway may comprise one or more oxidases that oxidize C11 of C24,25 dihydroxycucurbitadienol to produce mogrol.

[0093] In some embodiments, at least one oxidase is a cytochrome P450 enzyme. Exemplary cytochrome P450 enzymes comprise an amino acid sequence that is at least 70% identical to an amino acid sequence selected from SEQ ID NOS: 73 to 91, 171 to 176, and 194 to 200. In some embodiments, at least one P450 enzyme comprises an amino acid sequence that is at least 80%, or at least 85%, or at least 90%, or at least 95%, or at least 98%, or at least 99% identical to one of SEQ ID NOS: 73 to 91, 171 to 176, and 194 to 200. For example, at least one cytochrome P450 enzyme comprises an amino acid sequence having from 1 to 20 amino acid modifications with respect to one of SEQ ID NOS: 73 to 91, 171 to 176, and 194 to 200, the amino acid modifications being independently selected from amino acid substitutions, deletions, and insertions.

[0094] In some embodiments, the microbial host cell expresses a heterologous enzyme pathway comprising a P450 enzyme having activity for oxidation at C11 of C24,25 dihydroxycucurbitadienol, to thereby produce mogrol. For example, in some embodiments, the cytochrome P450 comprises an amino acid sequence that is at least 70% identical to an amino acid sequence selected from SEQ ID NO: 194 and SEQ ID NO: 171. See FIGS. 13A-C, FIG. 14, and FIG. 15. In some embodiments, the microbial host cell expresses a cytochrome P450 enzyme that comprises an amino acid sequence that is at least 80%, or at least 85%, or at least 90%, or at least 95%, or at least 98%, or at least 99% identical to one of SEQ ID NOS: 194 and 171. In some embodiments, at least one cytochrome P450 enzyme comprises an amino acid sequence having from 1 to 20 amino acid modifications with respect to one of SEQ ID NOS: 194 and 171, the amino acid modifications being independently selected from amino acid substitutions, deletions, and insertions.

[0095] In some embodiments, the cytochrome P450 enzyme has at least a portion of its transmembrane region substituted with a heterologous transmembrane region. For example, particularly in embodiments in which the microbial cell is a bacterium, the CYP450 and/or CPR is modified as described in US 2018/0251738, the contents of which are hereby incorporated by reference in their entireties. For example, in some embodiments, the CYP450 enzyme has a deletion of all or part of the wild type P450 N-terminal transmembrane region, and the addition of a transmembrane domain derived from an E. coli or bacterial inner membrane, cytoplasmic C-terminus protein. In some embodiments, the transmembrane domain is a single-pass transmembrane domain. In some embodiments, the transmembrane domain is a multi-pass (e.g., 2, 3, or more transmembrane helices)transmembrane domain. Exemplary transmembrane domains are derived from E. coli zipA or sohB. Alternatively, the P450 enzyme can employ its native transmembrane anchor, or the well-known bovine 17a anchor. See FIG. 14.

[0096] In some embodiments, the microbial host cell expresses a non-heme iron oxidase. Exemplary non-heme iron oxidases comprise an amino acid sequence that is at least 70% identical to an amino acid sequence selected from SEQ ID NOS: 100 to 115. In some embodiments, the non-heme iron oxidase comprises an amino acid sequence that is at least 80%, or at least 85%, or at least 90%, or at least 95%, or at least 98%, or at least 99% identical to one of SEQ ID NOS: 100 to 115.

[0097] In various embodiments, the microbial host cell expresses one or more electron transfer proteins selected from a cytochrome P450 reductase (CPR), flavodoxin reductase (FPR) and ferredoxin reductase (FDXR) sufficient to regenerate the one or more oxidases. Exemplary CPR proteins are provided herein as SEQ ID NOS: 92 to 99 and 201.

[0098] In some embodiments, the microbial host cell expresses a cytochrome P450 reductase, and which may comprise an amino acid sequence that is at least 70%, or at least 80%, or at least 85%, or at least 90%, or at least 95%, or at least 98%, or at least 99% identical to one of SEQ ID NOS: 92 to 99 and 201. For example, in some embodiments, the microbial host cell expresses SEQ ID NO: 194 or a derivative thereof (as described above), and SEQ ID NO: 98 or a derivative thereof (i.e., having at least 70%, at least 80%, or at least 90% sequence identity thereto). In some embodiments, the microbial host cell expresses SEQ ID NO: 171 or a derivative thereof (as described above), and SEQ ID NO: 201 or a derivative thereof (i.e., having at least 70%, at least 80%, or at least 90% sequence identity thereto).

[0099] In various embodiments, the heterologous enzyme pathway produces mogrol, which may be an intermediate for downstream enzymes in the heterologous pathway, or in some embodiments is recovered from the culture. Mogrol may be recovered from host cells in some embodiments, and/or can be recovered from the culture media.

[0100] In some embodiments, the heterologous enzyme pathway further comprises one or more uridine diphosphate-dependent glycosyltransferase (UGT) enzymes, thereby producing one or more mogrol glycosides (or “mogrosides”). The mogrol glycoside may be pentaglycosylated, hexaglycosylated, or more (e.g., 7, 8, or 9 glycosylations), in some embodiments. In other embodiments, the mogrol glycoside has two, three, or four glucosylations. The one or more mogrol glycosides may be selected from Mog.II-E, Mog.III, Mog.III-A1, Mog.III-A2, Mog.III, Mog.IV, Mog.IV-A, siamenoside, isomog.V, Mog.V, or Mog.VI. In some embodiments, the host cell produces Mog.V or siamenoside.

[0101] In some embodiments, the host cell expresses a UGT enzyme that catalyzes the primary glycosylation of mogrol at C24 and/or C3 hydroxyl groups. In some embodiments, the UGT enzyme catalyzes a branching glycosylation, such as a beta 1,2 and/or beta 1,6 branching glycosylation at the primary C3 and C24 glucosyl groups. UGT enzymes observed to catalyze primary glycosylation of C24 and/or C3 hydroxyl groups are summarized in Table 1. UGT enzymes observed to catalyze various branching glycosylation reactions are summarized in Table 2.

[0102] In some embodiments, at least one UGT enzyme comprises an amino acid sequence that is at least 70% identical to an amino acid sequence selected from SEQ ID NOS: 116 to 165, 202 to 210, 211, and 213 to 218. For example, in some embodiments, the UGT enzyme comprises an amino acid sequence that is at least 80%, or at least 85%, or at least 90%, or at least 95%, or at least 98%, or at least 99% identical to one of SEQ ID NOS: 116 to 165, 202 to 210, 211, and 213 to 218 Thus, at least one UGT enzyme comprises an amino acid sequence having from 1 to 20 amino acid modifications with respect to one of SEQ ID NOS: 116 to 165, 202 to 210, 211, and 212 to 218, the amino acid modifications being independently selected from amino acid substitutions, deletions, and insertions.

[0103] For example, in some embodiments, the microbial cell expresses at least four UGT enzymes, resulting in glucosylation of mogrol at the C3 hydroxyl group, the C24 hydroxyl group, as well as a further 1,6 glucosylation at the C3 glucosyl group, and a further 1,6 glucosylation and a further 1,2 glucosylation at the C24 glucosyl group. The product of such glucosylation reactions is Mog.V.

[0104] In some embodiments, at least one UGT enzyme comprises an amino acid sequence having at least 70% sequence identity to one of SEQ ID NO: 164, 165, 138, 204 to 211, and 213 to 218.

[0105] In some embodiments, at least one UGT enzyme comprises an amino acid sequence that is at least 70% identical to UGT85C1 (SEQ ID NO: 165). UGT85C1 exhibits primary glycosylation at the C3 and C24 hydroxyl groups. Thus, in some embodiments, at least one UGT enzyme comprises an amino acid sequence that is at least 80%, or at least 85%, or at least 90%, or at least 95%, or at least 98%, or at least 99% identical to SEQ ID NO. 165. The at least one UGT enzyme may comprise an amino acid sequence having from 1 to 20 amino acid modifications with respect to SEQ ID NO: 165, the amino acid modifications being independently selected from amino acid substitutions, deletions, and insertions. Exemplary amino acid substitutions include substitutions at positions 41 (e.g., L41F or L41Y), 49 (e.g., D49E), and 127 (e.g., C127F or C127Y).

[0106] In some embodiments, at least one UGT enzyme comprises an amino acid sequence that is at least 70% identical to SEQ ID NO: 164, which exhibits activity for adding branching glycosylations, both 1-2 and 1-6 branching glycosylations. In various embodiments, at least one UGT enzyme comprises an amino acid sequence that is at least 80%, or at least 85%, or at least 90%, or at least 95%, or at least 98%, or at least 99% identical to SEQ ID NO: 164. In exemplary embodiments, at least one UGT enzyme comprises an amino acid sequence having from 1 to 20 amino acid modifications with respect to SEQ ID NO: 164, the amino acid modifications being independently selected from amino acid substitutions, deletions, and insertions. Exemplary amino acid substitutions are shown in Table 3. Exemplary amino acid substitutions include substitutions at one or more positions selected from 150 (e.g., S150F, S150Y), 147 (e.g., T147L, T147V, T147I, and T147A), 207 (e.g., N207K or N207R), 270 (e.g., K270E or K270D), 281 (V281L or V281I), 354 (e.g., L354V or L354I), 13 (e.g., L13F or L13Y), 32 (T32A or T32G or T32L), and 101 (K101A or K101G), with respect to SEQ ID NO: 164. An exemplary engineered UGT enzyme comprises the amino acid substitutions T147L and N207K, with respect to SEQ ID NO: 164.

[0107] In some embodiments, at least one UGT enzyme comprises an amino acid sequence that is at least 70% identical to SEQ ID NO: 138, which exhibits an activity to catalyze 1-6 branching glycosylations. In some embodiments, at least one UGT enzyme comprises an amino acid sequence that is at least 80%, or at least 85%, or at least 90%, or at least 95%, or at least 98%, or at least 99% identical to SEQ ID NO: 138. In exemplary embodiments, at least one UGT enzyme comprises an amino acid sequence having from 1 to 20 amino acid modifications with respect to SEQ ID NO: 138, the amino acid modifications being independently selected from amino acid substitutions, deletions, and insertions.

[0108] In some embodiments, at least one UGT enzyme comprises an amino acid sequence that is at least 70% identical to SEQ ID NO: 204, which catalyzes 1-6 branching glycosylation, particularly at the C3 primary glucosylation. For example, at least one UGT enzyme may comprise an amino acid sequence that is at least 80%, or at least 85%, or at least 90%, or at least 95%, or at least 98%, or at least 99% identical to SEQ ID NO: 204. In exemplary embodiments, at least one UGT enzyme comprises an amino acid sequence having from 1 to 20 amino acid modifications with respect to SEQ ID NO: 204, the amino acid modifications being independently selected from amino acid substitutions, deletions, and insertions.

[0109] In some embodiments, at least one UGT enzyme comprises an amino acid sequence that is at least 70% identical to SEQ ID NO: 205, which catalyzes 1-6 branching glycosylation, including at both the C3 and C24 primary glucosylations. For example, at least one UGT enzyme may comprise an amino acid sequence that is at least 80%, or at least 85%, or at least 90%, or at least 95%, or at least 98%, or at least 99% identical to SEQ ID NO: 205. In exemplary embodiments, at least one UGT enzyme comprises an amino acid sequence having from 1 to 20 amino acid modifications with respect to SEQ ID NO: 205, the amino acid modifications being independently selected from amino acid substitutions, deletions, and insertions.

[0110] In some embodiments, at least one UGT enzyme comprises an amino acid sequence that is at least 70% identical to SEQ ID NO: 206, which catalyzes 1-2 and 1-6 branching glycosylations. For example, at least one UGT enzyme may comprise an amino acid sequence that is at least 80%, or at least 85%, or at least 90%, or at least 95%, or at least 98%, or at least 99% identical to SEQ ID NO: 206. In exemplary embodiments, at least one UGT enzyme comprises an amino acid sequence having from 1 to 20 amino acid modifications with respect to SEQ ID NO: 206, the amino acid modifications being independently selected from amino acid substitutions, deletions, and insertions.

[0111] In some embodiments, at least one UGT enzyme comprises an amino acid sequence that is at least 70% identical to SEQ ID NO: 207, which catalyzes 1-6 branching glycosylations of the primary glucosylations. For example, at least one UGT enzyme may comprise an amino acid sequence that is at least 80%, or at least 85%, or at least 90%, or at least 95%, or at least 98%, or at least 99% identical to SEQ ID NO: 207. In exemplary embodiments, at least one UGT enzyme comprises an amino acid sequence having from 1 to 20 amino acid modifications with respect to SEQ ID NO: 207, the amino acid modifications being independently selected from amino acid substitutions, deletions, and insertions.

[0112] In some embodiments, at least one UGT enzyme comprises an amino acid sequence that is at least 70% identical to SEQ ID NO: 208, which catalyzes 1-2 and 1-6 branching glycosylations. For example, at least one UGT enzyme may comprise an amino acid sequence that is at least 80%, or at least 85%, or at least 90%, or at least 95%, or at least 98%, or at least 99% identical to SEQ ID NO: 208. In exemplary embodiments, at least one UGT enzyme comprises an amino acid sequence having from 1 to 20 amino acid modifications with respect to SEQ ID NO: 208, the amino acid modifications being independently selected from amino acid substitutions, deletions, and insertions.

[0113] In some embodiments, at least one UGT enzyme comprises an amino acid sequence that is at least 70% identical to SEQ ID NO: 209, which catalyzes 1-6 branching glycosylations of the primary glucosylations. For example, at least one UGT enzyme may comprise an amino acid sequence that is at least 80%, or at least 85%, or at least 90%, or at least 95%, or at least 98%, or at least 99% identical to SEQ ID NO: 209. In exemplary embodiments, at least one UGT enzyme comprises an amino acid sequence having from 1 to 20 amino acid modifications with respect to SEQ ID NO: 209, the amino acid modifications being independently selected from amino acid substitutions, deletions, and insertions.

[0114] In some embodiments, at least one UGT enzyme comprises an amino acid sequence that is at least 70% identical to SEQ ID NO: 210), which catalyzes 1-6 branching glycosylations of the primary glucosylations. For example, at least one UGT enzyme may comprise an amino acid sequence that is at least 80%, or at least 85%, or at least 90%, or at least 95%, or at least 98%, or at least 99% identical to SEQ ID NO: 210. In exemplary embodiments, at least one UGT enzyme comprises an amino acid sequence having from 1 to 20 amino acid modifications with respect to SEQ ID NO: 210, the amino acid modifications being independently selected from amino acid substitutions, deletions, and insertions.

[0115] In some embodiments, at least one UGT enzyme comprises an amino acid sequence that is at least 70%/identical to SEQ ID NO: 211, which catalyzes 1-2 branching glycosylation of the C24 primary glucosylation. For example, at least one UGT enzyme may comprise an amino acid sequence that is at least 80%, or at least 85%, or at least 90%, or at least 95%, or at least 98%, or at least 99% identical to SEQ ID NO: 211. In exemplary embodiments, at least one UGT enzyme comprises an amino acid sequence having from 1 to 20 amino acid modifications with respect to SEQ ID NO: 210, the amino acid modifications being independently selected from amino acid substitutions, deletions, and insertions.

[0116] In some embodiments, at least one UGT enzyme comprises an amino acid sequence that is at least 70% identical to SEQ ID NO: 213, which catalyzes 1-6 branching glycosylation of the primary glucosylation at C24. For example, at least one UGT enzyme may comprise an amino acid sequence that is at least 80%, or at least 85%, or at least 90%, or at least 95%, or at least 98%, or at least 99% identical to SEQ ID NO: 213. In exemplary embodiments, at least one UGT enzyme comprises an amino acid sequence having from 1 to 20 amino acid modifications with respect to SEQ ID NO: 213, the amino acid modifications being independently selected from amino acid substitutions, deletions, and insertions.

[0117] In some embodiments, at least one UGT enzyme comprises an amino acid sequence that is at least 70% identical to SEQ ID NO: 214, which catalyzes primary glucosylation at C24. For example, at least one UGT enzyme may comprise an amino acid sequence that is at least 80%, or at least 85%, or at least 90%, or at least 95%, or at least 98%, or at least 99% identical to SEQ ID NO: 214. In exemplary embodiments, at least one UGT enzyme comprises an amino acid sequence having from 1 to 20 amino acid modifications with respect to SEQ ID NO: 214, the amino acid modifications being independently selected from amino acid substitutions, deletions, and insertions.

[0118] In some embodiments, at least one UGT enzyme comprises an amino acid sequence that is at least 70% identical to SEQ ID NO: 215, which catalyzes 1-6 branching glucosylation at C24. For example, at least one UGT enzyme may comprise an amino acid sequence that is at least 80%, or at least 85%, or at least 90%, or at least 95%, or at least 98%, or at least 99% identical to SEQ ID NO: 215. In exemplary embodiments, at least one UGT enzyme comprises an amino acid sequence having from 1 to 20 amino acid modifications with respect to SEQ ID NO: 215, the amino acid modifications being independently selected from amino acid substitutions, deletions, and insertions.

[0119] In still other embodiments, at least one UGT enzyme comprises an amino acid sequence that is at least 70% identical to SEQ ID NO: 146, which provides for glucosylation of the C24 hydroxyl of mogrol or Mog.IE. In some embodiments, at least one UGT enzyme comprises an amino acid sequence that is at least 80%, or at least 85%, or at least 90%, or at least 95%, or at least 98%, or at least 99% identical to SEQ ID NO. 146. In some embodiments, at least one UGT enzyme comprises an amino acid sequence having from 1 to 20 or from 1 to 10 amino acid modifications with respect to SEQ ID NO: 146, the amino acid modifications being independently selected from amino acid substitutions, deletions, and insertions. Amino acid modifications may be made to increase expression or stability of the enzyme in the microbial cell, or to increase productivity of the enzyme for particular substrates.

[0120] In some embodiments, at least one UGT enzyme comprises an amino acid sequence that is at least 70% identical to SEQ ID NO: 202, which catalyzes primary glycosylation at the C3 and C24 hydroxyl. For example, at least one UGT enzyme may comprise an amino acid sequence that is at least 80%, or at least 85%, or at least 90%, or at least 95%, or at least 98%, or at least 99% identical to SEQ ID NO: 202. In exemplary embodiments, at least one UGT enzyme comprises an amino acid sequence having from 1 to 20 amino acid modifications with respect to SEQ ID NO: 202, the amino acid modifications being independently selected from amino acid substitutions, deletions, and insertions.

[0121] In some embodiments, at least one UGT enzyme comprises an amino acid sequence that is at least 70% identical to SEQ ID NO: 218, which catalyzes primary glycosylation at the C24 hydroxyl. For example, at least one UGT enzyme may comprise an amino acid sequence that is at least 80%, or at least 85%, or at least 90%, or at least 95%, or at least 98%, or at least 99% identical to SEQ ID NO: 218. In exemplary embodiments, at least one UGT enzyme comprises an amino acid sequence having from 1 to 20 amino acid modifications with respect to SEQ ID NO: 218, the amino acid modifications being independently selected from amino acid substitutions, deletions, and insertions.

[0122] In some embodiments, at least one UGT enzyme comprises an amino acid sequence that is at least 70% identical to SEQ ID NO: 217, which catalyzes primary glycosylation at the C24 hydroxyl. For example, at least one UGT enzyme may comprise an amino acid sequence that is at least 80%, or at least 85%, or at least 90%, or at least 95%, or at least 98%, or at least 99% identical to SEQ ID NO: 217. In exemplary embodiments, at least one UGT enzyme comprises an amino acid sequence having from 1 to 20 amino acid modifications with respect to SEQ ID NO: 217, the amino acid modifications being independently selected from amino acid substitutions, deletions, and insertions. Exemplary amino acid substitutions include substitutions at one or more positions (with respect to SEQ ID NO: 17) selected from 74 (e.g., A74E or A74D), 91 (I91F or I91Y), 101 (e.g., H101P), 241 (e.g., Q241E or Q241D), and 436 (e.g., I436L or I436A). In some embodiments, the UGT enzyme comprises the following amino acid substitutions with respect to SEQ ID NO: 217: A74E, 191F, and H101P.

[0123] In some embodiments, at least one UGT enzyme comprises an amino acid sequence that is at least 70% identical to SEQ ID NO: 216, which catalyzes primary glycosylation at the C24 hydroxyl. For example, at least one UGT enzyme may comprise an amino acid sequence that is at least 80%, or at least 85%, or at least 90%, or at least 95%, or at least 98%, or at least 99% identical to SEQ ID NO: 216. In exemplary embodiments, at least one UGT enzyme comprises an amino acid sequence having from 1 to 20 amino acid modifications with respect to SEQ ID NO: 216, the amino acid modifications being independently selected from amino acid substitutions, deletions, and insertions.

[0124] In some embodiments, at least one UGT enzyme comprises an amino acid sequence that is at least 70% identical to SEQ ID NO: 117, SEQ ID NO: 210, or SEQ ID NO: 122. For example, the enzyme defined by SEQ ID NO: 117 catalyzes branching glycosylations. In some embodiments, at least one UGT enzyme comprises an amino acid sequence that is at least 80%, or at least 85%, or at least 90%, or at least 95%, or at least 98%, or at least 99% identical to SEQ ID NO: 117, SEQ ID NO: 210, or SEQ ID NO: 122. In some embodiments, at least one UGT enzyme comprises an amino acid sequence having from 1 to 20 amino acid modifications with respect to SEQ ID NO: 117, 210, or 122, the amino acid modifications being independently selected from amino acid substitutions, deletions, and insertions.

[0125] In some embodiments, the microbial cell expresses at least one UGT enzyme capable of catalyzing beta 1,2 addition of a glucose molecule to at least the C24 glucosyl group (e.g., of Mog. IVA). Exemplary UGT enzymes in accordance with these embodiments include SEQ ID NO: 117, SEQ ID NO:147, SEQ ID NO: 148, SEQ ID NO: 149, SEQ ID NO: 150, or SEQ ID NO: 163, or derivatives thereof. Derivatives include enzymes comprising amino acid sequence that are least 70% identical to one or more of SEQ ID NO: 117, SEQ ID NO: 147, SEQ ID NO: 148, SEQ ID NO: 149, SEQ ID NO: 150, and SEQ ID NO: 163. In some embodiments, the UGT enzyme catalyzing beta 1,2 addition of a glucose molecule to at least the C24 glucosyl group comprises an amino acid sequence that is at least 80%, or at least 85%, or at least 90%, or at least 95%, or at least 98%, or at least 99% identical to one or more of SEQ ID NO: 117, SEQ ID NO: 147, SEQ ID NO: 148, SEQ ID NO: 149, SEQ ID NO. 150, and SEQ ID NO: 163. In some embodiments, at least one UGT enzyme comprises an amino acid sequence having from 1 to 20 or having from 1 to 10 amino acid modifications with respect to SEQ ID NO. 117, SEQ ID NO: 147, SEQ ID NO: 148, SEQ ID NO: 149, SEQ ID NO: 150, and SEQ ID NO: 163, the amino acid modifications being independently selected from amino acid substitutions, deletions, and insertions. Amino acid modifications may be made to increase expression or stability of the enzyme in the microbial cell, or to increase productivity of the enzyme for particular substrates.

[0126] In some embodiments, at least one UGT enzyme is a circular permutant of a wild-type UGT enzyme, optionally having amino acid substitutions, deletions, and/or insertions with respect to the corresponding position of the wild-type enzyme. Circular permutants can provide novel and desirable substrate specificities, product profiles, and reaction kinetics over the wild-type enzymes. A circular permutant retains the same basic fold of the parent enzyme, but has a different position of the N-terminus (e.g., “cut-site”), with the original N- and C-termini connected, optionally by a linking sequence. For example, in the circular permutants, the N-terminal Methionine is positioned at a site in the protein other than the natural N-terminus. UGT circular permutants are described in US 2017/0332673, which is hereby incorporated by reference in its entirety. In some embodiments, at least one UGT enzyme is a circular permutant of a UGT enzyme described herein, such as but not limited to SEQ ID NO: 146, SEQ ID NO: 164, or SEQ ID NO: 165, SEQ ID NO: 117, SEQ ID NO: 147, SEQ ID NO: 148, SEQ ID NO: 149, SEQ ID NO: 150, SEQ ID NO: 163, SEQ ID NO: 202, SEQ ID NO: 216, SEQ ID NO: 217, and SEQ ID NO: 218. In some embodiments, the circular permutant further has one or more amino acid modifications (e.g., amino acid substitutions, deletions, and/or insertions) with respect to the parent UGT enzyme. In these embodiments, the circular permutant will have at least about 70%, or at least about 80%, or at least about 90%, or at least about 95%, or at least about 98% identity to the parent enzyme, when the corresponding amino acid sequences are aligned (i.e., without regard to the new N-terminus of the circular permutant). An exemplary circular permutant for use according to some embodiments is SEQ ID NO: 206.

[0127] In some embodiments, the microbial host cell expresses at least three UGT enzymes: a first UGT enzyme catalyzing primary glycosylation at the C24 hydroxyl of mogrol, a second UGT enzyme catalyzing primary glycosylation at the C3 hydroxyl of mogrol, and a third UGT enzyme catalyzing one or more branching glycosylation reactions. In some embodiments, the microbial host cell expresses one or two UGT enzymes catalyzing beta 1,2 and/or beta 1,6 branching glycosylations of the C3 and/or C24 primary glycosylations. For example, the UGT enzymes may comprise three or four UGT enzymes selected from:

[0128] SEQ ID NO: 165 or a derivative thereof;

[0129] SEQ ID NO: 146 or a derivative thereof;

[0130] SEQ ID NO: 214 or a derivative thereof;

[0131] SEQ ID NO: 129 or a derivative thereof;

[0132] SEQ ID NO: 164 or a derivative thereof;

[0133] SEQ ID NO: 116 or a derivative thereof;

[0134] SEQ ID NO: 202 or a derivative thereof;

[0135] SEQ ID NO: 218 or a derivative thereof;

[0136] SEQ ID NO: 217 or a derivative thereof;

[0137] SEQ ID NO: 138 or a derivative thereof;

[0138] SEQ ID NO: 204 or a derivative thereof;

[0139] SEQ ID NO: 205 or a derivative thereof;

[0140] SEQ ID NO: 207 or a derivative thereof;

[0141] SEQ ID NO: 208 or a derivative thereof;

[0142] SEQ ID NO: 209 or a derivative thereof;

[0143] SEQ ID NO: 11 or a derivative thereof;

[0144] SEQ ID NO: 215 or a derivative thereof;

[0145] SEQ ID NO: 213 or a derivative thereof;

[0146] SEQ ID NO: 206 or a derivative thereof;

[0147] SEQ ID NO: 122 or a derivative thereof; and

[0148] SEQ ID NO: 210) or a derivative thereof. Derivatives have sequence identity to the reference enzyme as described herein.

[0149] In some embodiments, the microbial host cell has one or more genetic modifications that increase the production of UDP-glucose, the co-factor employed by UGT enzymes. These genetic modifications may include one or more, or two or more (or all) of ΔgalE, ΔgalT, ΔgalK, ΔgalM, ΔushA, Δagp, Δpgm, duplication of E. coli galU, expression of Bacillus subtilis UGPA, and expression of Bifidobacterium adolescentis SPL.

[0150] Mogrol glycosides can be recovered from the microbial culture. For example, mogrol glycosides may be recovered from microbial cells, or in some embodiments, are predominately available in the extracellular media, where they may be recovered or sequestered.

[0151] In various embodiments, the reaction is performed in a microbial cell, and UGT enzymes are recombinantly expressed in the cell. In some embodiments, mogrol is produced in the cell by a heterologous mogrol synthesis pathway, as described herein. In other embodiments, mogrol or mogrol glycosides (such as a monkfruit extract) are fed to the cells for glycosylation. In still other embodiments, the reaction is performed in vitro using purified UGT enzyme, partially purified UGT enzyme, or recombinant cell lysates.

[0152] As described herein, the microbial host cell can be prokaryotic or eukaryotic, and is optionally a bacterium selected from Escherichia coli, Bacillus subtilis, Corynebacterium glutamicum, Rhodobacter capsulatus, Rhodobacter sphaeroides, Zymomonas mobilis, Vibrio natriegens, or Pseudomonas putida. In some embodiments, the microbial cell is a yeast selected from a species of Saccharomyces, Pichia, or Yarrowia, including Saccharomyces cerevisiae, Pichia pastoris, and Yarrowia lipolytica. In some embodiments, the microbial host cell is E. coli.

[0153] The bacterial host cell is cultured to produce the triterpenoid product (e.g., mogroside). In some embodiments, carbon substrates such as C1, C2, C3, C4, C5, and/or C6 carbon substrates are employed for the production phase. In exemplary embodiments, the carbon source is glucose, sucrose, fructose, xylose, and/or glycerol. Culture conditions are generally selected from aerobic, microaerobic, and anaerobic.

[0154] In various embodiments, the bacterial host cell may be cultured at a temperature between 22° C. and 37° C. While commercial biosynthesis in bacteria such as E. coli can be limited by the temperature at which overexpressed and/or foreign enzymes (e.g., enzymes derived from plants) are stable, recombinant enzymes may be engineered to allow for cultures to be maintained at higher temperatures, resulting in higher yields and higher overall productivity. In some embodiments, the culturing is conducted at about 22° C. or greater, about 23° C. or greater, about 24° C. or greater, about 25° C. or greater, about 26° C. or greater, about 27° C. or greater, about 28° C. or greater, about 29° C. or greater, about 30° C. or greater, about 31° C. or greater, about 32° C. or greater, about 33° C. or greater, about 34° C. or greater, about 35° C. or greater, about 36° C. or greater, or about 37° C.

[0155] In some embodiments, the bacterial host cells are further suitable for commercial production, at commercial scale. In some embodiments, the size of the culture is at least about 100 L, at least about 200 L, at least about 500 L, at least about 1,000 L, or at least about 10,000 L, or at least about 100,000 L, or at least about 500,000 L, or at least about 600,000 L. In an embodiment, the culturing may be conducted in batch culture, continuous culture, or semi-continuous culture.

[0156] In various embodiments, methods further include recovering the product from the cell culture or from cell lysates. In some embodiments, the culture produces at least about 100 mg/L, or at least about 200 mg/L, or at least about 500 mg/L, or at least about 1 g/L, or at least about 2 g/L, or at least about 5 g/L, or at least about 10 g/L, or at least about 20 g/L, or at least about 30 g/L, or at least about 40 g/L of the terpenoid or terpenoid glycoside product.

[0157] In some embodiments, the production of indole (including prenylated indole) is used as a surrogate marker for terpenoid production, and/or the accumulation of indole in the culture is controlled to increase production. For example, in various embodiments, accumulation of indole in the culture is controlled to below about 100 mg/L, or below about 75 mg/L, or below about 50 mg/L, or below about 25 mg/L, or below about 10 mg/L. The accumulation of indole can be controlled by balancing protein expression and activity using the multivariate modular approach as described in U.S. Pat. No. 8,927,241 (which is hereby incorporated by reference), and/or is controlled by chemical means.

[0158] Other markers for efficient production of terpene and terpenoids, include accumulation of DOX or ME in the culture media. Generally, the bacterial strains may be engineered to accumulate less of these chemical species, which accumulate in the culture at less than about 5 g/L, or less than about 4 g/L, or less than about 3 g/L, or less than about 2 g/L, or less than about 1 g/L, or less than about 500 mg/L, or less than about 100 mg/L.

[0159] The optimization of terpene or terpenoid production by manipulation of MEP pathway genes, as well as manipulation of the upstream and downstream pathways, is not expected to be a simple linear or additive process. Rather, through combinatorial analysis, optimization is achieved through balancing components of the MEP pathway, as well as upstream and downstream pathways. Indole (including prenylated indole) accumulation and MEP metabolite accumulation (e.g., DOX, ME, MEcPP, and/or farnesol) in the culture can be used as surrogate markers to guide this process.

[0160] For example, in some embodiments, the bacterial strain has at least one additional copy of dxs and idi expressed as an operon/module; or dxs, ispD, ispF, and idi expressed as an operon or module (either on a plasmid or integrated into the genome), with additional MEP pathway complementation described herein to improve MEP carbon. For example, the bacterial strain may have a further copy of dxr, and ispG and/or ispH, optionally with a further copy of ispE and/or idi, with expressions of these genes tuned to increase MEP carbon and/or improve terpene or terpenoid titer. In various embodiments, the bacterial strain has a further copy of at least dxr, ispE, ispG and ispH, optionally with a further copy of idi, with expressions of these genes tuned to increase MEP carbon and/or improve terpene or terpenoid titer.

[0161] Manipulation of the expression of genes and/or proteins, including gene modules, can be achieved through various methods. For example, expression of the genes or operons can be regulated through selection of promoters, such as inducible or constitutive promoters, with different strengths (e.g., strong, intermediate, or weak). Several non-limiting examples of promoters of different strengths include Trc, T5 and T7. Additionally, expression of genes or operons can be regulated through manipulation of the copy number of the gene or operon in the cell. In some embodiments, expression of genes or operons can be regulated through manipulating the order of the genes within a module, where the genes transcribed first are generally expressed at a higher level. In some embodiments, expression of genes or operons is regulated through integration of one or more genes or operons into the chromosome.

[0162] Optimization of protein expression can also be achieved through selection of appropriate promoters and ribosomal binding sites. In some embodiments, this may include the selection of high-copy number plasmids, or single-, low- or medium-copy number plasmids. The step of transcription termination can also be targeted for regulation of gene expression, through the introduction or elimination of structures such as stem-loops.

[0163] Expression vectors containing all the necessary elements for expression are commercially available and known to those skilled in the art. See, e.g., Sambrook et al., Molecular Cloning: A Laboratory Manual, Second Edition, Cold Spring Harbor Laboratory Press, 1989. Cells are genetically engineered by the introduction into the cells of heterologous DNA. The heterologous DNA is placed under operable control of transcriptional elements to permit the expression of the heterologous DNA in the host cell.

[0164] In some embodiments, endogenous genes are edited, as opposed to gene complementation. Editing can modify endogenous promoters, ribosomal binding sequences, or other expression control sequences, and/or in some embodiments modifies trans-acting and/or cis-acting factors in gene regulation. Genome editing can take place using CRISPR/Cas genome editing techniques, or similar techniques employing zinc finger nucleases and TALENs. In some embodiments, the endogenous genes are replaced by homologous recombination.

[0165] In some embodiments, genes are overexpressed at least in part by controlling gene copy number. While gene copy number can be conveniently controlled using plasmids with varying copy number, gene duplication and chromosomal integration can also be employed. For example, a process for genetically stable tandem gene duplication is described in US 2011/0236927, which is hereby incorporated by reference in its entirety.

[0166] The terpene or terpenoid product can be recovered by any suitable process. For example, the aqueous phase can be recovered, and/or the whole cell biomass can be recovered, for further processing. The production of the desired product can be determined and/or quantified, for example, by gas chromatography (e.g., GC-MS). The desired product can be produced in batch or continuous bioreactor systems.

[0167] The similarity of nucleotide and amino acid sequences, i.e. the percentage of sequence identity, can be determined via sequence alignments. Such alignments can be carried out with several art-known algorithms, such as with the mathematical algorithm of Karlin and Altschul (Karlin & Altschul (1993) Proc. Natl. Acad. Sci. USA 90: 5873-5877), with hmmalign (HMMER package, http://hmmer.wustl.edu/) or with the CLUSTAL algorithm (Thompson, J. D., Higgins, D. G. & Gibson, T. J. (1994) Nucleic Acids Res. 22, 4673-80). The grade of sequence identity (sequence matching) may be calculated using e.g. BLAST, BLAT or BlastZ (or BlastX). A similar algorithm is incorporated into the BLASTN and BLASTP programs of Altschul et al (1990) J. Mol. Biol. 215: 403-410. BLAST polynucleotide searches can be performed with the BLASTN program, score=100, word length=12.

[0168] BLAST protein searches may be performed with the BLASTP program, score=50, word length=3. To obtain gapped alignments for comparative purposes, Gapped BLAST is utilized as described in Altschul et al (1997) Nucleic Acids Res. 25: 3389-3402. When utilizing BLAST and Gapped BLAST programs, the default parameters of the respective programs are used. Sequence matching analysis may be supplemented by established homology mapping techniques like Shuffle-LAGAN (Brudno M., Bioinformatics 2003b, 19 Suppl 1.154-162) or Markov random fields.

[0169] “Conservative substitutions” may be made, for instance, on the basis of similarity in polarity, charge, size, solubility, hydrophobicity, hydrophilicity, and/or the amphipathic nature of the amino acid residues involved. The 20 naturally occurring amino acids can be grouped into the following six standard amino acid groups:

[0170] (1) hydrophobic: Met, Ala, Val, Leu, Ile;

[0171] (2) neutral hydrophilic: Cys, Ser, Thr; Asn, Gin;

[0172] (3) acidic: Asp, Glu;

[0173] (4) basic: His, Lys, Arg;

[0174] (5) residues that influence chain orientation: Gly, Pro; and

[0175] (6) aromatic: Trp, Tyr, Phe.

[0176] As used herein, “conservative substitutions” are defined as exchanges of an amino acid by another amino acid listed within the same group of the six standard amino acid groups shown above. For example, the exchange of Asp by Glu retains one negative charge in the so modified polypeptide. In addition, glycine and proline may be substituted for one another based on their ability to disrupt α-helices. Some preferred conservative substitutions within the above six groups are exchanges within the following sub-groups: (i) Ala, Val, Leu and Ile; (ii) Ser and Thr; (ii) Asn and Gin; (iv) Lys and Arg; and (v) Tyr and Phe.

[0177] As used herein, “non-conservative substitutions” are defined as exchanges of an amino acid by another amino acid listed in a different group of the six standard amino acid groups (1) to (6) shown above.

[0178] Modifications of enzymes as described herein can include conservative and/or non-conservative mutations. In some embodiments, an Alanine is substituted or inserted at position 2, to increase stability.

[0179] In some embodiments “rational design” is involved in constructing specific mutations in enzymes. Rational design refers to incorporating knowledge of the enzyme, or related enzymes, such as its reaction thermodynamics and kinetics, its three dimensional structure, its active site(s), its substrate(s) and/or the interaction between the enzyme and substrate, into the design of the specific mutation. Based on a rational design approach, mutations can be created in an enzyme which can then be screened for increased production of a terpene or terpenoid relative to control levels. In some embodiments, mutations can be rationally designed based on homology modeling. As used herein, “homology modeling” refers to the process of constructing an atomic resolution model of one protein from its amino acid sequence and a three-dimensional structure of a related homologous protein.

[0180] In other aspects, the invention provides a method for making a product comprising a mogrol glycoside. The method comprises producing a mogrol glycoside in accordance with this disclosure, and incorporating the mogrol glycoside into a product. In some embodiments, the mogrol glycoside is siamenoside, Mog.V, Mog.VI, or Isomog.V. In some embodiments, the product is a sweetener composition, flavoring composition, food, beverage, chewing gum, texturant, pharmaceutical composition, tobacco product, nutraceutical composition, or oral hygiene composition.

[0181] The product may be a sweetener composition comprising a blend of artificial and/or natural sweeteners. For example, the composition may further comprise one or more of a steviol glycoside, aspartame, and neotame. Exemplary steviol glycosides comprises one or more of RebM, RebB, RebD, RebA, RebE, and RebI.

[0182] Non-limiting examples of flavors for which the products can be used in combination include lime, lemon, orange, fruit, banana, grape, pear, pineapple, mango, bitter almond, cola, cinnamon, sugar, cotton candy and vanilla flavors. Non-limiting examples of other food ingredients include flavors, acidulants, and amino acids, coloring agents, bulking agents, modified starches, gums, texturizers, preservatives, antioxidants, emulsifiers, stabilizers, thickeners and gelling agents.

[0183] Mogrol glycosides obtained according to this invention may be incorporated as a high intensity natural sweetener in foodstuffs, beverages, pharmaceutical compositions, cosmetics, chewing gums, table top products, cereals, dairy products, toothpastes and other oral cavity compositions, etc.

[0184] Mogrol glycosides obtained according to this invention can be used in combination with various physiologically active substances or functional ingredients. Functional ingredients generally are classified into categories such as carotenoids, dietary fiber, fatty acids, saponins, antioxidants, nutraceuticals, flavonoids, isothiocyanates, phenols, plant sterols and stanols (phytosterols and phytostanols), polyols; prebiotics, probiotics; phytoestrogens; soy protein; sulfides/thiols; amino acids; proteins; vitamins; and minerals. Functional ingredients also may be classified based on their health benefits, such as cardiovascular, cholesterol-reducing, and anti-inflammatory.

[0185] Mogrol glycosides obtained according to this invention may be applied as a high intensity sweetener to produce zero calorie, reduced calorie or diabetic beverages and food products with improved taste characteristics. It may also be used in drinks, foodstuffs, pharmaceuticals, and other products in which sugar cannot be used. In addition, highly purified target mogrol glycoside(s), particularly, Mog.V, Mog.VI, or Isomog.V, can be used as a sweetener not only for drinks, foodstuffs, and other products dedicated for human consumption, but also in animal feed and fodder with improved characteristics.

[0186] Examples of products in which mogrol glycoside(s) may be used as a sweetening compound include, but are not limited to, alcoholic beverages such as vodka, wine, beer, liquor, and sake, etc.; natural juices; refreshing drinks; carbonated soft drinks; diet drinks; zero calorie drinks; reduced calorie drinks and foods; yogurt drinks; instant juices; instant coffee; powdered types of instant beverages; canned products; syrups; fermented soybean paste; soy sauce; vinegar; dressings; mayonnaise; ketchups; curry; soup; instant bouillon; powdered soy sauce: powdered vinegar; types of biscuits; rice biscuit; crackers; bread; chocolates; caramel; candy; chewing gum; jelly; pudding; preserved fruits and vegetables; fresh cream; jam; marmalade; flower paste; powdered milk; ice cream; sorbet; vegetables and fruits packed in bottles; canned and boiled beans; meat and foods boiled in sweetened sauce; agricultural vegetable food products: seafood; ham; sausage; fish ham; fish sausage; fish paste; deep fried fish products; dried seafood products, frozen food products; preserved seaweed; preserved meat; tobacco: medicinal products; and many others.

[0187] During the manufacturing of products such as foodstuffs, drinks, pharmaceuticals, cosmetics, table top products, and chewing gum, the conventional methods such as mixing, kneading, dissolution, pickling, permeation, percolation, sprinkling, atomizing, infusing and other methods may be used.

[0188] As used in this specification and the appended claims, the singular forms “a”, “an” and “the” include plural referents unless the content clearly dictates otherwise. For example, reference to “a cell” includes a combination of two or more cells, and the like.

[0189] As used herein, the term “about” in reference to a number is generally taken to include numbers that fall within a range of 10% in either direction (greater than or less than) of the number.

### EXAMPLES

[0190] The biosynthesis of mogrosides in fruit involves a number of consecutive glycosylations of the aglycone mogrol to the final sweet products, including mogroside V (Mog.V). Mog.V has a sweetening capacity that is about 250 times that of sucrose (Kasai et al., Agric Biol Chem (1989)). Mogrosides are reported to have health benefits as well (Li et al., Chin J Nat Med (2014)).

[0191] A variety of factors are promoting a surge in interest in mogrosides and monkfruit in general, including an explosion in demand for natural sweeteners, difficulties in scalable sourcing of the current lead natural sweetener, rebaudioside M (RebM) from the Stevia plant, the superior taste performance of Mog.V relative to other natural and artificial sweetener products on the market, and the medicinal potential of the plant and fruit.

[0192] Purified Mog.V has been approved as a high-intensity sweetening agent in Japan (Jakinovich et al., Journal of Natural Products (1990)) and the extract has gained GRAS status in the USA as a non-nutritive sweetener and flavor enhancer (GRAS 522). Extraction of mogrosides from the fruit can yield a product of varying degrees of purity, often accompanied by undesirable aftertaste. In addition, yields of mogroside from cultivated fruit are limited due to low plant yields and particular cultivation requirements of the plant. Mogrosides are present at ˜1% in the fresh fruit and ˜4% in the dried fruit. Mog.V is the main component, with a content of 0.5%-1.4% in the dried fruit. Moreover, purification difficulties limit purity for Mog.V, with commercial products from plant extracts being standardized to ˜50% Mog.V. A pure Mog.V product is desirable to avoid off flavors, and will be easier to formulate into products, since Mog.V has good solubility potential. It is therefore advantageous to produce sweet mogroside compounds, such as but not limited to Mog.V, via biotechnological processes.

[0193] FIG. 1 shows the chemical structures of Mog.V, Mog.VI, Isomog.V, and Siamenoside. Mog.V has five glucosylations with respect to the mogrol core, including glucosylations at the C3 and C24 hydroxyl groups, followed by 1-2, 1-4, and 1-6 glucosyl additions. These glucosylation reactions are catalyzed by uridine diphosphate-dependent glycosyltransferase enzymes (UGTs).

[0194] FIG. 2 shows routes to Mog.V production in vivo. The enzymatic transformation required for each step is indicated, along with the type of enzyme required. Numbers in parentheses correspond to the chemical structures in FIG. 3, namely: (1) farnesyl pyrophosphate; (2) squalene; (3) 2,3-oxidosqualene; (4) 2,3;22,23-dioxidosqualene, (5) 24,25-epoxycucurbitadienol; (6) 24,25-dihydrooxycucurbitadienol; (7) mogrol; (8) mogroside V; (9) cucurbitadienol.

[0195] Mogrosides can be produced by biosynthetic fermentation processes, as illustrated in FIG. 2, using microbial strains that produce high levels of methylerythritol 4-phosphate (MEP) pathway products, along with heterologous expression of mogrol biosynthesis enzymes and UGT enzymes that direct glucosylation reactions to Mog.V, or other desired mogroside compound. For example, in bacteria such as E. coli, isopentenyl pyrophosphate (IPP) and dimethylallyl pyrophosphate (DMAPP) can be produced from glucose, and are converted to farnesyl diphosphate (FPP) (1) by recombinant farnesyl diphosphate synthase (FPPS). FPP is converted to squalene (2) by a condensation reaction catalyzed by squalene synthase (SQS). Squalene is converted to 2,3-oxidosqualene (3) by an epoxidation reaction catalyzed by a squalene epoxidase (SQE). The pathway can proceed to 22,23-dioxidosqualene (4) by further epoxidation followed by cyclization to 24,25-epoxycucurbitadienol (5) by a triterpene cyclase, and then hydration of the remaining epoxy group to 24,25-dihydroxycucurbitadienol (6) by an epoxide hydrolase. A further hydroxylation catalyzed by a P450 oxidase produces mogrol (7).

[0196] The pathway can alternatively proceed by cyclization of (3) to produce cucurbitadienol (9), followed by epoxidation to (5), or multiple hydroxylations of cucurbitadienol to 24,25-dihydroxycucurbitadienol (6), or to mogrol (7).

[0197] FIG. 4 illustrates glucosylation routes to Mog.V. Glucosylation of the C3 hydroxyl produces Mog.I-E, or glucosylation of the C24 hydroxyl produces Mog.I-A1. Glucosylation of Mog.I-A1 at C3 or glucosylation of Mog.I-E1 at C24 produces Mog.III-E. Further 1-6 glucosylation of Mog.II-E at C3 produces Mog.III-A2. Further 1-6 glucosylation at C24 of Mog.IIE produces Mog.III. 1-2 glucosylation of Mog.III-A2 at C24 produces Mog.IV, and then to Mog.V with a further 1-6 glucosylation at C24. Alternatively, glucosylations may proceed through Mog.III, with a 1-6 glucosylation at C3 and a 1-2 glucosylation at C24, or through Siamenoside or Mog.IV with 1-6 glucosylations.

[0198] While biosynthetic enzymes from monkfruit (Siraitia grosvenorii) have been identified for production of mogrol (See, WO 2016/038617 and US 2015/0322473, which are hereby incorporated by reference in their entireties), many of these enzymes lack the productivity or physical properties desired for overexpression in microbial hosts, particularly for fermentation approaches that operate at higher temperatures than the natural climate of the plant. Accordingly, alternative or engineered enzymes are desired to improve production of mogrol using microbial fermentation, with mogrol acting as the substrate for glucosylation to produce Mog.V or other target mogroside.

[0199] Using an E. coli strain that produces high levels of the MEP pathway products IPP and DMAPP (see US 2018/0245103 and US 2018/0216137, which are hereby incorporated by reference), and with overexpression of ScFPPS, enzymes were screened for their ability to convert FPP to squalene (SQS activity), as well epoxidation of squalene to produce 2,3-oxidosqualene (SQE activity). The 2,3-oxidosqualene intermediate can by cyclized by a triterpene cyclase, such as CDS from Siraitia grosvenorii. As demonstrated in FIG. 5, several enzymes were identified with good activity in E. coli. In particular, SEQ ID NO: 11 showed high activity in E. coli at 37° C. culture conditions.

[0200] As shown in FIG. 6, co-expression of SQS (SEQ ID NO: 11) and SQE (SEQ ID NO: 39) in E. coli provided a substantial gain in titer of the 2,3-oxidosqualene intermediate. Other SQE enzymes were active in E. coli.

[0201] FIG. 7 shows coexpression of SQS, SQE, and TTC enzymes. CDS (or triterpene cyclase, or “TTC”) (SEQ ID NO: 40), when coexpressed with SQS (SEQ ID NO: 11) and SQE (SEQ ID NO: 39), resulted in high production of the triterpenoid product, cucurbitadienol (Product 3). These fermentation experiments were performed at 37° C. for 48 to 120 hours. FIG. 8 shows results for SQE engineering to produce high titers of 2,3;22,23-dioxidosqualene. Expression of SQS, SQE, and TTC whether on a bacterial artificial chromosome (BAC) or integrated, produce large amounts of cucurbitadienol. Point mutations in SQE (SEQ ID NO: 39) were screened to complement SQE (SEQ ID NO 39) to reduce levels of cucurbitadienol, with corresponding gain in titers of 2,3;22,23-dioxidosqualene. Two SQE mutants are shown in FIG. 8, SQE A4 and SQE C11. By complementing SQE (SEQ ID NO: 39) with a second engineered version with higher specificity/activity for 2,3-oxidosqualene, titers can be pushed toward 2,3;22,23-dioxidosqualene, as opposed to cucurbitadienol. This concept is demonstrated further in FIG. 9. SQE A4 (SEQ ID NO: 203) was co-expressed with SQE (SEQ ID NO: 39), SQS (SEQ ID NO: 11), and TTC (SEQ ID NO: 40). These fermentation experiments were performed at 37° C. for 48 hours in 96 well plates. Titers were plotted for each strain producing 2,3;22,23 dioxidosqualene. As shown in FIG. 9, the strain expressing SQE A4 (SEQ ID NO: 203) produced much more 2,3;22,23 dioxidosqualene.

[0202] FIG. 10 shows the coexpression of SQS, SQE, and TTC enzymes. TTC (SEQ ID NO 40), when coexpressed with SQS (SEQ ID NO: 11), SQE (SEQ ID NO: 39), and SQE A4 (SEQ ID NO: 203) in E. coli, resulted in production of cucurbitadienol and 24,25-epoxycucurbitadienol. Candidate enzymes for an additional or alternative TTC include SEQ ID NO: 40, SEQ ID NO: 191, SEQ ID NO: 192, and SEQ ID NO: 193. Each candidate TTC enzyme was expressed in this strain and screened for production of 24,25-epoxy-cucurbitadienol. These fermentation experiments were performed at 30° C. for 72 hours in 96 well plates. 24,25-epoxy-cucurbitadienol production was verified by GC-MS spectrum analysis. Concentrations were plotted relative to production of 24,25-epoxy-cucurbitadienol from an E. coli strain expressing SEQ ID NO: 40 as the only cyclase. As shown in FIG. 10, E. coli strains coexpressing SQS (SEQ ID NO: 11), SQE (SEQ ID NO: 39), SQE A4 (SEQ ID NO: 203), and TTC (SEQ ID NO: 40), with an additional TTC, produced higher levels of 24,25-epoxycucurbitadienol.

[0203] FIG. 11 shows substrate specificity for production of cucurbitadienol and 24,25-epoxycucurbitadienol with candidate TTC enzymes. Engineered E. coli strains producing oxidosqualene and dioxidosqualene were complemented with CDS homologs and CAS genes engineered for cucurbitadienol production. Strains were incubated at both 30° C. for 72 hours before extraction. The ratio of 24,25-epoxycucurbitadienol to cucurbitadienol varies from 0.15 for Enzyme 1 (SEQ ID NO: 40) to 0.58 for Enzyme 2 (SEQ ID NO: 192), pointing to improved substrate specificity toward the desired 24,25-epoxycucurbitadienol product for Enzyme 2.

[0204] FIG. 12 shows the screening of EPH enzymes for hydration of epoxycucurbitadienol to produce 24,25-dihydroxycucurbitadienol in E. coli strains coexpressing SQS (SEQ ID NO: 11), SQE (SEQ ID NO: 39), SQE A4 (SEQ ID NO 203), and TTC (SEQ ID NO: 40). EPH homologs were expressed in a strain producing 24,25-epoxycucurbitadienol for production of 24,25-dihydroxycucurbitadienol. Candidate EPH enzymes for this reaction include SEQ ID NO: 184, SEQ ID NO: 185, SEQ ID NO: 186, SEQ ID NO: 212, SEQ ID NO: 187, SEQ ID NO: 188, SEQ ID NO: 189, and SEQ ID NO: 190. These fermentation experiments were performed at 30° C. for 72 hours in 96 well plates. 24,25-dihydroxycucurbitadienol production was verified by GC-MS spectrum analysis. Titers were plotted for each strain producing 24,25-dihydroxycucurbitadienol. As shown in FIG. 12, the E. coli strains expressing the EPHs were able to produce 24,25-dihydroxycucurbitadienol. ToEPH and SgEPH3 in particular demonstrated high activity in E. coli FIG. 13A-C shows the coexpression of SQS, SQE, TTC, EPH, and P450 enzymes to produce mogrol. E. coli strains were constructed that express SQS (SEQ ID NO. 11), SQE (SEQ ID NO: 39), SQE A4 (SEQ ID NO: 203), TTC (SEQ ID NO: 40), EPH (SEQ ID NO: 58), and a P450 selected from SEQ ID NO: 194, SEQ ID NO: 197, and SEQ ID NO: 171, together with a cytochrome P450 reductase (9SEQ ID NO: 98 or SEQ ID NO: 201). These fermentation experiments were performed at 30° C. for 72 hours in 96 well plates. Mogrol production was verified by LC-QQQ spectrum analysis. As shown in FIG. 13A, the expression of SQS (SEQ ID NO: 11), SQE (SEQ ID NO: 39), SQE A4 (SEQ ID NO: 203), TTC (SEQ ID NO: 40), EPH (SEQ ID NO: 58), and the P450s SEQ ID NO: 194, SEQ ID NO: 197, and SEQ ID NO: 171 resulted in production of mogrol and oxo-mogrol. As shown in FIG. 13B and FIG. 13C, mogrol production was validated by LC-QQQ mass spectrum analysis using spiked authentic standard (FIG. 13B) and GC-FID chromatography versus an authentic standard (FIG. 13C), respectively.

[0205] FIG. 14 shows the screening of cytochrome P450s for oxidation at C11 of the 24,25-dihydroxycucurbitadienol-like molecule cucurbitadienol. In many cases, the native transmembrane domain was replaced with the transmembrane domain from E. coli sohB (SEQ ID NO: 195, SEQ ID NO: 198, and SEQ ID NO: 199), E. coli zipA (SEQ ID NO. 196), or bovine 17% (e.g. SEQ ID NO: 200) to improve interaction with the E. coli membrane. Each P450 was coexpressed with either SEQ ID NO: 201 or SEQ ID NO: 98, resulting in production of 11-hydroxycucurbitadienol. These fermentation experiments were performed at 30° C. for 72 hours in 96 well plates. 11-hydroxy-cucurbitadienol production was verified by GC-MS. Concentrations were plotted for strains producing 11-hydroxycucurbitadienol. As shown in FIGS. 14 and 15, the strains disclosed herein were capable of production of 11-hydroxy-cucurbitadienol.

[0206] Mogrol was used as a substrate for in vitro glucosylation reactions with candidate UGT enzymes, to identify candidate enzymes that provide efficient glucosylation of mogrol to Mog.V. Reactions were carried out in 50 mM Tris-HCl buffer (pH 7.0) containing beta-mercaptoethanol (5 mM), magnesium chloride (400 uM), substrate (200 uM), UDP-glucose (5 mM), and a phosphatase (1 U). Results are shown in FIG. 16A. Mog.V product is observed when the UGT enzymes of SEQ ID NO: 165, SEQ ID NO: 146, and SEQ ID NO: 117 are incubated together. A penta-glycosylated product is formed when the UGT enzymes of SEQ ID NO: 165, SEQ ID NO: 146, and SEQ ID NO: 164) are incubated together. FIG. 16B, Extracted ion chromatogram (EIC) for 1285.4 Da (mogroside V+H) of reactions containing enzymes of SEQ ID NO: 165+SEQ ID NO 146 and either SEQ ID NO: 117 (solid dark grey line) or SEQ ID NO: 164 (light grey line) when incubated with Mog.II-E. FIG. 16C, Extracted ion chromatogram (EIC) for 1285.4 Da (mogroside V+H) of reactions containing enzymes of SEQ ID NO: 165+SEQ ID NO: 146 and either SEQ ID NO: 117 (solid dark grey line) or SEQ ID NO: 164 (light grey line) when incubated with mogrol.

[0207] FIG. 4 and FIG. 17 show additional glycosyltransferase activities observed on particular substrates Coexpression of UGT enzymes can be selected to move product to the desired mogroside product.

[0208] FIG. 18 shows the bioconversion of mogrol into mogroside intermediates. Engineered E. coli strains (see US 2020/0087692, which is hereby incorporated by reference in its entirety) expressing UGT enzymes were incubated in 96-well plates with 0.2 mM mogrol. Product formation was examined after 48 hours. Reported values are those in excess of the empty vector control. Products were measured on LC-MS/MS with authentic standards. Only Enzyme 1 shows formation of Mog.IIE. Enzymes 1 to 5 are SEQ ID NOS: 202, 116, 216, 217, and 218, respectively.

[0209] FIG. 19A and FIG. 19B shows the bioconversion of Mog.IA (FIG. 19A) or Mog.IE (FIG. 19B) into Mog IIE. In the experiment, engineered E. coli strains (as above) expressing UGT enzymes, SEQ ID NO: 165, SEQ ID NO: 202, or SEQ ID NO: 116 were incubated in fermentation media containing 0.2 mM Mog.IA (FIG. 19A) or Mog.IE (FIG. 19B) in 96-well plates at 37° C. Product formation was examined after 48 hours. Products were measured on LC-MS/MS with authentic standards. The values of Mog.IIE levels in excess of the empty vector control were calculated. As shown in FIG. 19A, SEQ ID NO: 165 and SEQ ID NO: 202 were able to catalyze bioconversion of Mog.IA into Mog.IIE. Similarly, as shown in FIG. 19B, SEQ ID NO: 165, SEQ ID NO: 202, and SEQ ID NO: 116 were able to catalyze the bioconversion of Mog.IE into Mog.IIE.

[0210] FIG. 20 shows the production of Mog.II or siamenoside from Mog.II-E. In the experiment, engineered E. coli strains expressing UGT enzymes SEQ ID NO: 204, SEQ ID NO: 138 or SEQ ID NO: 206 were grown in fermentation media containing 0.1 mM Mog.II-E at 37° C. for 48 hr. Products were quantified by LCMS/MS with authentic standards of each compound. As shown in FIG. 20, all strains were able to catalyze bioconversion of Mog. IE to Mog.III. In addition, MbUGT1,2.2 also showed production of substantial amounts of siamenoside.

[0211] FIG. 21 shows the production of Mog.II-A2. 0.1 mM Mog.I-E was fed in vitro. In the experiment, engineered E. coli strains expressing UGT enzyme SEQ ID NO: 205 were incubated at 37° C. for 48 hr. Products were quantified by LC-MS/MS with authentic standards of each compound. As shown in FIG. 21, SEQ ID NO: 205 is able to catalyze bioconversion of Mog.IE to Mog.II-A2.

[0212] A summary of observed primary glycosylation reactions at C3 and C24 hydroxyls of mogrol are provided in Table 1. Specifically, 0.2 mM mogrol was fed to cells expressing various UGT enzymes. Reactions were incubated at 37° C. for 48 hrs. Products were quantified by LCMS/MS with authentic standards of each compound.

TABLE 1

| UGT | C3 O-Glucosylation | C24 O-Glucosylation |
|---|---|---|
| SEQ ID NO: 165 | Yes | Yes |
| SEQ ID NO: 146 | No | Yes |
| SEQ ID NO: 214 | No | Yes |
| SEQ ID NO: 202 | Yes | Yes |
| SEQ ID NO: 129 | Yes | No |
| SEQ ID NO: 116 | Yes | Yes |
| SEQ ID NO: 218 | No | Yes |
| SEQ ID NO: 216 | No | Yes |
| SEQ ID NO: 217 | No | Yes |

[0213] A summary of branched glycosylation reactions are provided in Table 2. 0.2 mM Mog.IIE or Mog.IE was fed to cells expressing various UGT enzymes. Reactions were incubated at 37° C. for 48 hr. Products were quantified by LC-MS/MS with authentic standards of each compound. “Indirect” evidence means that consumption of substrate was observed.

TABLE 2

| Name | C3 1-2 | C3 1-6 | C24 1-2 | C24 1-6 |
|---|---|---|---|---|
| SEQ ID NO: 205 | No | Yes | No | Yes |
| SEQ ID NO: 204 | No | Yes | No | No |
| SEQ ID NO: 122 | No | Yes | Yes | Yes |
| SEQ ID NO: 211 | No | No | Yes | No |
| SEQ ID NO: 138 | No | Yes | No | Yes |
| SEQ ID NO: 207 | No | Yes | No | Yes |
| SEQ ID NO: 209 | No | Yes | No | Yes |
| SEQ ID NO: 208 | Yes | Yes | Yes | Yes |
| | (Indirect) | | (Indirect) | (Indirect) |
| SEQ ID NO: 206 | Yes | Yes | Yes | Yes |
| | (Indirect) | (Indirect) | | |
| SEQ ID NO: 164 | No | Yes | Yes | Yes |
| SEQ ID NO: 210 | No | Yes | No | Yes |
| SEQ ID NO: 215 | No | No | No | Yes |
| SEQ ID NO: 213 | No | No | No | Yes |

[0214] An exemplary E. coli strain producing Mog.V was created by expressing the following enzymes in an K E. coli strain engineered to produce high levels of MEP pathway products: SQS (SEQ ID NO: 11), SQE (SEQ ID NO: 39), SQE A4 (SEQ ID NO: 203), TTC (SEQ ID NO: 40), EPH (SEQ ID NO: 189), .sohB_CppCYP (SEQ ID NO: 199), AtUGT73C3 (SEQ ID NO: 202), UGT85C1 (SEQ ID NO: 165), and UGT94-289-1 (SEQ ID NO: 122). Production of Mog.V is demonstrated in FIG. 22A, B. Strains were incubated at 30° C. for 72 hours before extraction. Mog.V production was verified by LC-QQQ spectrum analysis versus an authentic standard FIG. 22A. FIG. 22B shows a chromatogram indicating Mog.V production from a biological sample with a spiked Mog.V authentic standard.

[0215] Biosynthesis enzymes can be further engineered for expression and activity in microbial cells, using known structures and primary sequences.

[0216] FIG. 26 is an amino acid alignment of CaUGT_1,6 and SgUGT94_289_3 using Clustal Omega (Version CLUSTAL O (1,2,4). These sequences share 54% amino acid identity. Coffea arabica UGT_1,6 is predicted to be a beta-D-glucosyl crocetin beta 1,6-glucosyltransferase-like (XP_027096357.1). Together with known UGT structures and primary sequences, CaUGT_1,6 can be further engineered for microbial expression and activity, including engineering of a circular permutant.

[0217] FIG. 27 is an amino acid alignment of Homo sapiens squalene synthase (HsSQS) (NCBI accession NP_004453.3) and AaSQS (SEQ ID NO: 11) using Clustal Omega (Version CLUSTAL O (1.2.4)). HsSQS has a published crystal structure (PDB entry: 1EZF). These sequences share 42% amino acid identity.

[0218] FIG. 28 is an amino acid alignment of Homo sapiens squalene epoxidase (HsSQE) (NCBI accession XP_011515548) and MlSQE (SEQ ID NO: 39) using Clustal Omega (Version CLUSTAL O (1.2.4)). HsSQE has a published crystal structure (PDB entry: 6C6N). These sequences share 35% amino acid identity.

[0219] The UGT enzyme of SEQ ID NO: 164 was engineered for improved glycosylation activity. Various amino acid substitutions were made to the enzyme, as informed by in silico analysis. The following amino acid substitutions in Table 3 were tested for further glycosylation of mog.IIE.

TABLE 3

| | Fold Improviment in UDP-Glucose |
|---|---|
| Substitution | Transferred |
| G150F | 13.2 |
| T147L | 13.0 |
| N207K | 10.9 |
| K270E | 10.0 |
| V281L | 9.1 |
| L354V | 8.6 |
| L13F | 7.5 |
| T32A | 5.6 |
| K101A | 5.3 |
| C219E | 4.9 |
| V281Q | 4.6 |
| S43T | 4.6 |
| M394V | 4.6 |
| E74G | 4.5 |
| K270P | 4.1 |
| T256V | 3.9 |
| V175K | 3.9 |
| N283G | 3.4 |
| D285P | 3.3 |
| A377V | 3.2 |
| F217L | 3.1 |
| K204R | 3.1 |
| T303A | 3.0 |
| D95K | 2.9 |
| S14 II | 2.7 |
| K270T | 2.7 |
| V281A | 2.5 |
| A166 del. | 2.2 |
| G205S | 2.1 |
| N333S | 2.0 |
| K270M | 2.0 |
| F132L | 2.0 |
| L40F | 1.9 |
| A166K | 1.9 |
| V281K | 1.8 |
| R185S | 1.7 |
| F8L | 1.7 |
| F258Y | 1.7 |
| N35G | 1.7 |
| N133G | 1.7 |
| A77P | 1.6 |
| N207Y | 1.6 |
| K386D | 1.6 |
| Y163F | 1.5 |
| N399R | 1.5 |
| H18Y | 1.5 |
| A166S | 1.3 |
| K101E | 1.3 |
| Q418K | 1.3 |
| 1191V | 1.3 |
| R182S | 1.2 |
| K101Q | 1.2 |
| S142F | 1.2 |
| T46N | 1.2 |
| T159E | 1.2 |
| T55P | 1.2 |
| K160D | 1.2 |
| T7K | 1.2 |
| A166T | 1.1 |

[0220] An engineered UGT enzyme based on SEQ ID NO: 164 was prepared having substitutions T147L and N207K. The bioconversion of Mog.IIE to further glycosylated products is shown in FIG. 23. In the experiment, engineered E. coli strains expressing the engineered CaUGT_1,6 were inoculated with Mog.IIE substrate at 37° C. Product formation was examined after 48 hours. Products were measured on LC/MS-QQQ with authentic standards.

[0221] The UGT enzyme of SEQ ID NO: 165 was engineered for improved glycosylation activity. The following amino acid substitutions were identified as improving bioconversion of Mog.IA to Mog.IIE (Table 4):

TABLE 4

| | Fold Improvement in Mog.IA to Mog.IIE |
|---|---|
| Substitution | Bioconversion |
| CTL | 1 |
| L41F | 1.29 |
| D49E | 1.36 |
| C127F | 1.48 |

[0222] An engineered UGT enzyme based on 85C1 was prepared having substitutions L41F, D49E, and C127F. The bioconversion of Mog.IA to Mog.IIE is shown in FIG. 24. In the experiment, engineered E. coli strains expressing the engineered 85C11 were inoculated with Mog.IA substrate at 37° C. Product formation was examined after 48 hours. Products were measured on LC/MS-QQQ with authentic standards. FIG. 24 shows the fold improvement of the engineered version compared to the control (85C1).

[0223] The UGT enzyme of SEQ ID NO: 217 (UGT73F24) was engineered for improved glycosylation activity. The following amino acid substitutions were identified as improving bioconversion of Mog.IE to Mog.IIE with UGT73F24 (Table 5):

TABLE 5

| | Fold Improvement in Mog.IE to Mog.IIE |
|---|---|
| Substitution | Production |
| CTL | 1 |
| A74E | 1.88 |
| I191F | 2,01 |
| H101P | 2.38 |
| Q241E | 1.31 |
| I436L | 1.09 |

[0224] An engineered UGT enzyme based on UGT73F24 was prepared having substitutions A74E, 19F, and H101P. The bioconversion of Mog.IE to Mog.IIE is shown in FIG. 25. In the experiment, engineered E. coli strains expressing the engineered UGT73F24 were inoculated with Mog.IE substrate at 37° C. Product formation was examined after 48 hours. Products were measured on LC/MS-QQQ with authentic standards. FIG. 25 shows the fold improvement of the engineered version compared to the control (73F24).

SEQUENCES
Farnesyl Pyrophosphate Synthase (FPPS)
Saccharomyces cerevisiae FPPS
(SEQ ID NO: 1)
MASEKEIRRERFLNVFPKLVEELNASLLAYGMPKEACDWYAHSLNYNTPGGKLNRCLSVVDTYA
ILSNKTVEQLGQEEYEKVAILGWCIELLQAYFLVADDMMDKSITRRGQPCWYKVPEVGEIAIND
AFMLEAAIYKLLKSHFRNEKYYIDITELFHEVTFQTELGQLMDLITAPEDKVDLSKFSLKKHSF
IVTFKTAYYSFYLPVALAMYVAGITDEKDLKQARDVLIPLGEYFQIQDDYLDCFGTPEQIGKIG
TDIQDNKCSWVINKALELASAEQRKTLDENYGKKDSVAEAKCKKIFNDLKIEQLYHEYEESIAK
DLKAKISQVDESRGFKADVLTAFLNKVYKRSK
Squalene Synthase (SQS)
Siraitia grosvenorii SQSa
(SEQ ID NO: 2)
MGSLGAILRHPDDFYPLLKLKMAARHAEKQIPPEPHWGFCYTMLHKVSRSFALVIQQLAPELRN
AICIFYLVLRALDTVEDDTSIQTDIKVPILKAFHCHIYNRDWHFSCGTKDYKVLMDQFHHVSTA
FLELGKGYQEATEDITKRMGAGMAKFICKEVETVDDYDEYCHYVAGLVGLGLSKLFHASDLEDL
APDSLSNSMGLLLQKTNIIRDYLEDINEIPKSRMFWPREIWGKYADKLEDFKYEENSVKAVQCI
NDLVTNALNHVEDCLKYMSNLRDLSIFRFCAIPQIMAIGTLALCYNNVEVFRGVVKMRRGLTAK
VIDRTQTMADVYGAFFDFSVMLKAKVNSSDPNATKTLSRIEAIQKTCEQSGLLNKRKLYAVKSE
PMFNPTLIVILFSLLCIILAYLSAKRIPANQPV
Siraitia grosvenorii SQSb
(SEQ ID NO: 3)
MGSLGAILRHPDDFYPLLKLKMAARHAEKQIPPEPHWGFCYTMLHKVSRSFALVIQQLAPELRN
AICIFYLVLRALDTVEDDTSIQTDIKVPILKAFHCHIYNRDWHFSCGTKDYKVLMDQFHHVSTA
FLELGKGYQEAIEDITKRMGAGMAKFICKEVETVDDYDEYCHYVAGLVGLGLSKLFHASDLEDL
APDSLSNSMGLLLQKTNIIRDYLEDINEIPKSRMFWPREIWGKYADKLEDFKYEENSVKAVQCL
NDLVTNALNHVEDCLKYMSNLRDLSIFRFCAIPQIMAIGTLALCYNNVEVFRGVVKMRRGLTAK
VIDRTQTMADVYGAFFDFSVMLKAKVNNSDPNATKTLSRIEAIQKTCEQSGLLNKRKLYAVKSE
PMFNPTLIVILFSLLCIILAYLSAKRLPANQPV
Cucumis sativus
(SEQ ID NO: 4)
MGSLGAILKHPDDFYPLLKLKIAARHAEKQIPPEPHWGFCYTMLHKVSRSFALVIQQLKPELRN
AVCIFYLVLRALDTVEDDTSIQTDIKVPILKAFHCHIYNRDWHFSCGTKDYKVLMDEFHHVSTA
FLELGKGYQEAIEDITKRMGAGMAKFICKEVETVDDYDEYCHYVAGLVGLGLSKLFHAAELEDL
APDSLSNSMGLFLOKTNIIRDYLEDINEIPKSRMFWPREIWGKYADKLEDFKYEENSVKAVQCL
NDLVTNALNHVEDCLKYMSNLRDLSIFRFCAIPQIMAIGTLALCYNNVEVFRGVVKMRRGLTAK
VIDRTKTMADVYGAFFDFSVMLKAKVNSNDPNASKTLSRIEAIQKTCKQSGILNRRKLYVVRSE
PMFNPAVIVILFSLLCIILAYLSAKRLPANQSV
Cucumis melo
(SEQ ID NO: 5)
MGSLGAILKHPDDFYPLLKLKMAARHAEKQIPPESHWGFCYTMLHKVSRSFALVIQQLKPELRN
AVCIFYLVLRALDTVEDDTSIQTDIKVPILKAFHCHIYNRDWHFSCGTKDYKVLMDEFHHVSTA
FLELGKGYQEAIEDITKRMGAGMAKFICKEVETVDDYDEYCHYVAGLVGLGLSKLFHAAELEDL
APDSLSNSMGLFLQKTNIIRDYLEDINEIPKSRMFWPREIWGKYADKLEDFKYEENSVKAVQCL
NDLVTNALNHVEDCLKYMSNLRDLSIFRFCAIPQIMAIGTLALCYNNVEVFRGVVKMRRGLTAK
VIDRTKTMADVYGAFFDESVMLKAKVNSNDPNASKTLSRIEAIQQTCQQSGLMNKRKLYVVRSE
PMYNPAVIVILFSLLCIILAYLSAKRLPANQSV
Cucumis melo
(SEQ ID NO: 6)
MGSLGAILKHPDDFYPLLKLKMAARHAEKQIPPESHWGFCYTMLHKVSRSFALVIQQLKPBLRN
AVCIFYLVLRALDTVEDDTSIQTDIKVPILKAFHCHIYNRDWHFSCGTKDYKVLMDEFHHVSTA
FLELGKGYQEAIEDITKRMGAGMAKFICKEVETVDDYDEYCHYVAGLVGLGLSKLFHAAELEDL
APDSLSNSMGLFLQKTNIIRDYLEDINEIPKSRMFWPRBIWGKYADKLEDFKYEENSVKAVQCI
NDLVTNALNHVEDCPKYMSNLRDLSIFRFCAIPQIMAIGTLALCYNNVEVFRGVVEMRRGLTAK
VIDRTKTMADVYGAFFDFSVMLKAKVNSNDPNASKTLSRIEAIQQTCQQSGLMNKRKLYVVRSE
PMYNPAVIVILFSLLCIILAYLSAKRLPANQSV
Cucurbita moschata
(SEQ ID NO: 7)
MGSLGAILRHPDDIYPLLKLKMAARHAEKQIPPESHWGFCYTMLHKVSRSFALVIQQLKPELRN
AVCIFYLVLRALDTVEDDTSIQTDIKVPILKAPHCHIYNRDWHFSCGTKDYKVLMDEFHHVSTA
FLELGRGYQEAIEDITKRMGAGMAKFICKEVETVEDYDEYCHYVAGLVGLGLSKLFHASKSENL
APDSLSNSMGLFLQKTNIIRDYLEDINEIPKSRMFWPREIWSKYADKLEDFKYEKNSVKAVQCL
NDLVTNALTHVEDCLEYMSNLKDLSIFRFCAIPQIMAIGTLALCYNNVDVFRGVVKMRRGLTAK
VIYRTKTMADVYGAFFDFSVMLKAKVNSSDPNASKTLTRIEAIQKTCKQSGLLNKRELYAVRSE
PMCNPAAIVVLFSLLCIILAYLSAKLLPANQPV
Sechium edule
(SEQ ID NO: 8)
MGSLGAILSHPDDLYPLLKLKMAAKHAEKQIPPDPHWGFCFSMLHKVSRSFALVIQQLKPELRN
AVCIFYLVLRALDTVEDDTGIHPDIKVPILQAFHCHIYNRDWHFSCGTKHYKVLMDEFHHVSTA
FLELGKGYQEAIEDVTERMGAGMAKFICKEVETVDDYDEYCHYVAGLVGLGLSKLFHAAELEDL
APDSLSNSMGLFLQKTNIIRDYLEDINEIPKSRMFWPREIWNKYADKLEDFKYEENSVKAVQCL
NDLVTNALNHVEDCLKYMSNLKDLSTFRFCAIPQIMAIGTLALCYDNVEVFRGVVKMRRGLTAK
IIDRTKKIADVYGAFFDFSVMLKAKVNSSDPNAAKTLSRIEAIEKTCKESGLLNKRKLYVIRSE
PLFNPAVLVILFSLICILLAYLSAKRLPANQPV
Panax quinquefolius
(SEQ ID NO: 9)
MGSLGAILKHPDDFYPLLKLKFAARHAEKQIPPEPHWAFCYSMLHKVSRSFGLVIQQLGPQLRD
AVCIFYLVLRALDTVEDDTSIPTEVKVPILMAFHRHIYDKDWHFSCGTKEYKVLMDEFHHVSNA
FLELGSGYQEAIEDITMRMGAGMAKFICKEVETIDDYDEYCHYVAGLVGLGLSKLFHASGAEDL
ATDSLSNSMGLFLQKTNIIRDYLEDINEIPKSRMFWPRQIWSKYVDKLEDLKYEENSAKAVQCI
NDMVTDALVHAEDCLKYMSDLRDPAIFRFCAIPQIMAIGTLALCFNNTQVFRGVVKMRRGLTAK
VIDRTKTMSDVYGAFFDFSCLLKSKVDNNDPNATKTLSRLEAIOKTCKESGTLSKRKSYITESE
SGHNSALIAI IFIILAILYAYLSSNLLLNKQ
Malus domestica
(SEQ ID NO: 10)
MGALSTMLKHPDDIYPLLKLKIASRQIEKQIPAEPHWAFCYTMLQKVSRSFALVIQQLGTELRN
AVCLFYLVLRALDTVEDDTSVATDVKVPILLAFHRHIYDPDWHFACGTNNYKVLMDEFHHVSTA
FLELGTGYQEAIEDITKRMGAGMAKFILKEVETIDDYDEYCHYVAGLVGLGLSKLFHAAGKEDL
ASDSLSNSMGLFLQKTNIIRDYLEDINEIPKSRMFWPRQIWSKYVNKLEDLKYEENSEKAVQCL
NDMVTNALIHMEDCLKYMAALRDPAIFKFCAIPQIMAIGTLALCYNNIEVFRGVVKMRRGLTAK
VIDRTKSMDDVYGAFFDFSSILKSKVDKNDPNATKTLSRVEAVQKLCRDSGALSKRKSYIANRE
QSYNSTLIVALFIILAIIYAYLSASPRI
Artemisia annua
(SEQ ID NO: 11)
MSSLKAVLKHPDDFYPLLKLKMAAKKAEKQIPSQPHWAFSYSMLHKVSRSFALVIQQLNPQLRD
AVCIFYLVLRALDTVEDDTSIAADIKVPILIAFHKHIYNRDWHFACGTKEYKVLMDQFHHVSTA
FLELKRGYQEAIEDITMRMGAGMAKFICKEVETVDDYDEYCHYVAGLVGIGLSKLFHSSGTEIL
FSDSISNSMGLFLQKTNIIRDYLEDINEIPKSRMFWPREIWSKYVNKLEDLKYEENSEKAVQCL
NDMVTNALIHIEDCLKYMSQLKDPAIFRFCAIPQIMAIGTLALCYNNIEVFRGVVKLRRGLTAK
VIDRTKTMADVYQAFSDFSDMLKSKVDMHDPNAQTTITRLEAAQKICKDSGTLSNRKSYIVKRE
SSYSAALLALLFTILAILYAYLSANRPNKIKFTL
Glycine soja
(SEQ ID NO: 12)
MDQRSEDEFYPLLKLKIVARNAEKQIPPEPHWAFCYTMLHKVSRSFALVIQQLGIELRNAVCIF
YLVLRALDTVEDDTSIETDVKVPILIAFHRHIYDRDWHFSCGTKEYKVLMGQFHHVSTAFLELG
KNYQEAIEDITKRMGAGMAKFICKEVETIDDYDEYCHYVAGLVGLGLSKLFHASGSEDLAPDDL
SNSMGLFLQKTNIIRDYLEDINEIPKSRMFWPRQIWSEYVNKLEDLKYEENSVKAVQCLNDMVT
NALMHAEDCLTYMAALRDPPIFRFCAIPQIMAIGTLALCYNNIEVFRGVVKMRRGLTAKVIDRT
KTMADVYGAFFDFASMLEPKVDKNDPNATKTLSRLEAIQKTCRESGLLSKRKSYIVNDESGYGS
TMIVILVIMVSIIFAYLSANHHNS
Diospyros kaki
(SEQ ID NO: 13)
MGSLAAMLRHPDDVYPLVKLKMAARHAEKQIPPEPHWAFCYTMLHKVSRSFGLVIQQLGTELRN
AVCIFYLVLRALDTVEDDTSIATEVKVPILLAFHHHIYDRDWHFSCGTREYKVLMDEFHHVSTA
FLELGKGYQEAIEDITMRMGAGMAKFICKEVETIDDYDEYCHYvAGLVGLGLSKLFHASGLEDL
APDSLSNSMGLFLQKTNIIRDYLEDINEIPKSRMFWPROIWSKYvNKLEDLKYEKNSVKSvQCL
NDMVTNALIHVDDCLKYMSALRDPAIFRFCAIPQIMAIGTLALCYNNIEVFRGVVKMRRGLTAK
VIDQTKTISDVYGAFFDFSCMLKSKVEKNDPNSTKTLSRIEAIQKTCRESGTLSKRKSYILRSK
RTHNSTLIFVLFIILAILFAYLSANRPPINM
Euphorbia lathyris
(SEQ ID NO: 14)
MGSLGAILKHPDDFYPLLKLKMAAKHAEKQIPAQPHWGFCYSMLHKVSRSFSLVIQOLGTELRD
AVCIFYLVLRALDTVEDDTSIPTDVKVPILIAFHKHIYDPEWHFSCGTKEYKVLMDQIHHLSTA
FLELGKSYQEAIEDITKKMGAGMAKFICKEVETVDDYDEYCHYVAGLVGLGLSKLFDASGFEDL
APDDLSNSMGLFLQKTNIIRDYLEDINEIPKSRMFWPRQIWSKYVNKLEDLKYEENSVKAVQCL
NDMVTNALIHMDDCLKYMSALRDPAIFRFCAIPQIMAIGTLALCYNNVEVFRGVVKMRRGLTAK
VIDRTRTMADVYRAFFDFSCMMKSKVDRNDPNAEKTLNRLEAVQKTCKESGLLNKRRSYINESK
PYNSTMVILLMIVLAIILAYLSKRAN
Camellia oleifera
(SEQ ID NO: 15)
MGSLGAILKHPDDFYPLMKLKMAARRAEKNIPPEPHWGFCYSMLHKVSRSFALVIQQLDTELRN
AVCIFYLVLRALDTVEDDTSIATEVKVPILMAFHRHIYDRDWHFSCGTKEYKVLMDEFHHVSTA
FSELGRGYQEAIEDITMRMGAGMAKFICKEVETIDDYDEYCHYVAGLVGLGLSKLFHASGSEDL
ASDSLSNSMGLFLQVFLLTCIKTNIIRDYLEDINEIPKSRMFWPRQIWSKYVNKLEDLKDKENS
VKAVECLNDMVTNALIHVEDCLTYMSALRDPSIFRFCAIPQIMAIGTLALCYNNIEVFRGVVKM
RRGLTAKVIDRTKTMSDVYGGFFDFSCMLKSKVNKSDPNAMKALSRLEAIQKICRESGTLNKRK
SYIIKSEPRYNSTLVFVLFIILAILFAYL
Eleutherococcus senticosus
(SEQ ID NO: 16)
MGSLGAILKHPDDFYPLLKLKFAARHAEKQIPPEPHWAFCYSMLHKVSRSFGLVIQQLDAQLRD
AVCIFYLVLRALDTVEDDTSIPTEVKVPILMAFHRHIYDKDWHFSCGTKEYKVLMDEFHHVSNA
FLELGSGFQEAIEDITMRMGAGMAKFICKEVETIDDYDEYCHYVAGLVGLGLSKLFHASGAEDL
ATDSLSNSMGLFLQKTNIIRDYLEDINEIPKSRMFWPRQIWSKYVDKLENLKYEENSAKAVQCL
NDMVTNALLHAEDCLKYMSNLRDPAIFRFCAIPQIMAIGTLALCFNNIQVFRGVVKMRRGLTAK
VIDRTKTMSDVYGAFFDFSCLLKSKVDNNDPNATKTLSRLEAIQKTCKESGTLSKRKSYIIESK
SAHNSALIAIIFIILAILYAYLSSNLPNNQ
Flavobacteriales bacterium
(SEQ ID NO: 166)
MLNNSLFSRLEEIPALLKLKLGSKDYYKNNNSETLTCDNLRYCFDTLNKVSRSFATVIKQLPNE
LGNNVCVFYLILRALDSIEDDMNLPKELKIKLLREFHKKNYESGWNISGVGDKKEHVELLENYD
KVIQSFLAIDQKNQLIITDICRKVGAGMANFVKAEIESVEDYNLYCHHVAGLVGIGLSRMFISS
GLENDDFLNQDEISNSMGLFLQKTNIVRDYREDLDEGRMFWPKDIWHVYGSKINDFAINPTHDQ
SVLCLNHMLNNALTHATDCLAYLKHLRNENIFKFCAIPQVMAMATLCKIYSNPDVFIKNVKIRK
GLAAKLILNTTSMDEVIKVYKDMLLVIESKISSDNNPVSAETIQLLKQIREYFNDETLIVRKIA
Bacteroidetes bacterium
(SEQ ID NO: 167)
MLNSSLFSRLEEIPALLKLKLGSINNYKNNNSENLTSKNLRYCFDTLNKVSRSFASVIKQLPNE
LMVNVCLFYLILRALDSIEDDMNLPKDFKINLLREFLDKNYEPGWKISGVGDKKEYVELLENYD
KVIQVFLDIDPKNQLIITDICRKMGAGMAHFVEAEINSVKDYNLYCYHVAGLVGIGLSKMFLAS
GLENCDYLNQEEISSSMGLFLQKTNIVRDYKEDMEENRIFWPKEIWRTYASKFSDFSINPQHET
SISCLNHMVNDALGHVIDCLEYLRHLRNENIFKFCAIPOVMAMATLCKVYNNPDVFIKTVKIRK
GLAAKLILNTTSMDEVIKVYKGLLLDIENKIPLHNPTSDETLRLIKNIRSYCNNETMVVSKTA
Squalene Epoxidase
Siraitia grosvenorii SQE1
(SEQ ID NO: 17)
MVDQCALGWILASALGLVIALCFFVAPRRNHRGVDSKERDECVQSAATTKGECRFNDRDVDVIV
VGAGVAGSALAHTLGKDGRRVHVIERDLTEPDRIVGELLQPGGYLKLIELGLQDCVEEIDAQRV
YGYALFKDGKNTRLSYPLENFHSDVSGRSFHNGRFIQRMREKAASLPNVRLEQGTVTSLLEEKG
TIKGVQYKSKNGEEKTAYAPLTIVCDGCFSNLRRSLCNPMVDVPSYFVGLVLENCELPFANHGH
VILGDPSPILFYQISRTEIRCLVDVPGQKVPSIANGEMEKYLKTVVAPQVPPQIYDSFIAAIDK
GNIRTMPNRSMPAAPHPTPGALLMGDAFNMRHPLTGGGMTVALSDIVVLRNLLKPLKDLSDAST
LCKYLESFYTLRKPVASTINTLAGALYKVFCASPDQARKEMRQACFDYLSLGGIFSNGPVSLLS
GLNPRPLSLVLHFFAVAIYGVGRLLLPFPSVKGIWIGARLIYSASGIIFPIIRAEGVRQMFFPA
TVPAYYRSPPVFKPIV
Siraitia grosvenorii SQE2
(SEQ ID NO: 18)
MVDQCALGWILASVLGAAALYFLFGRKNGGVSNERRHESTKNIATTNGEYKSSNSDGDIIIVGA
GVAGSALAYTLGKDGRRVHVIERDLTEPDRIVGELLQPGGYLKLTELGLEDCVDDIDAQRVYGY
ALFKDGKDTRLSYPLEKFHSDVAGRSFHNGRFIQRMREKAASLPKVSLEQGTVTSLLEENGIIK
GVQYKTKTGQEMTAYAPLTIVCDGCFSNLRRSLCNPKVDVPSCFVGLVLENCDLPYANHGHVIL
ADPSPILFYRISSTEIRCLVDVPGQKVPSISNGEMANYLKNVVAPQIPSQLYDSFVAATDKGNI
RTMPNRSMPADPYPTPGALLMGDAFNMRHPLTGGGMTVALSDVVVLRDLLKPLRDLNDAPTLSK
YLEAFYTLRKPVASTINTLAGALYKVFCASPDQARKEMRQACFDYLSLGGIFSNGPVSLLSGLN
PRPISLVLHFFAVAIYGVGRLLIPFPSPKRVWIGARIISGASAIIFPIIKAEGVRQMFFPATVA
AYYRAPRVVKGR
Momordica charantia
(SEQ ID NO: 19)
MVDECALGWILAAALGAVIALCLEVAPKTNNQDGGVDSKATPECVQTTNGECRSDGDSDVIIVG
AGVAGSALAHTLGKDGRRVHVIERDLTEPDRIVGELLQPGGYLKLIELGLADCVEEIDAQRVYG
YALFKDGKNTRLSYPLEKFHSDVSGRSFHNGRFIQRMREKADSLPNVRLEQGTVTSLLEEKGTI
KGVQYKSKDGKEKTAYAPLTIVCDGCFSNLRRSLCNPMVDVPSCFVGLVLENCQLPFANHGHVV
LGDPSPILFYPISSTEIRCLVDVPGQKVPSISNGEMEKYLKTVVAPQVPPQIYDAFIAAIDKGN
IRTMPNRSMPAAPHPTPGALLMGDAFNMRHPLTGGGMTVALSDIVVLRNLLKPLKDLHDAPTLC
KYLESFYTLRKPVASTINTLAGALYKVFCASPDQARKEMRQACFDYLSLGGMFSNGPVSLLSGL
NPRPLSLVLHFFAVAIYGVGRLLFPFPSPKGIWIGARLIYSASGIIFPIIKAEGVRQMFFPATV
PAYYRSPPALKPVA
Cucurbita maxima
(SEQ ID NO: 20)
MVDYCAFGWILAAVLGLAIALSFFVSPRRNRRGGADSTPRSEGVRSSSTTNGECRSVDGDADVI
IVGAGVAGSALAHTLGKDGRLVHVIERDLTEPDRIVGELLQPGGYLKLIELGLQDCVEEIDAQK
VYGYALFKDGKNTQLSYPLEKFQSDVSGRSFHNGRFIQRMREKAASLPNVRLEQGTVTSLLEEK
GTIKGVQYKSKNGEEKTAYAPLTIVCDGCFSNLRRSLCKPMVDVPSCFVGLVLENCQLPFANHG
HVVLGDPSPILFYPISSTEIRCLVDVPGQKIPSISNGEMEKYLKTIVAPQVPPQIHDAFIAAID
KGNIRTMPNRSMPAAFQPrPGALLMGDAENMRHPLTGGGMIVALSDlVVLRNLLKPLKDLNDAL
TLCKYLESFYTLRKPVASTINTLAGALYKVFCASPDQARKEMRQACFDYLSLGGIFSNGPVSLL
SGLNPRPLSLVLHFFAVAIYGVGRLLLPFPSPKGIWIGARLVYSASGIIFPIIKAEGVRQMFFP
ATVPAYYRSPPVHKSIA
Cucurbita moschata
(SEQ ID NO: 21)
MVDYCAFGWILAAVLGLAIALSFFVSPRRNRRGGADSTPRSEGVRSSSTTNGECRSVDCDADVI
IVGAGVAGSALAHTLGKDGRLVHVIERDLTEPDRIVGELLQPGGYLKLIELGLQDCVEEIDAQK
VYGYALFKDGKNTQLSYPLEKFQSDVSGRSFHNGRFIQRMREKAASLPNVRLEQGTVTSLLEEK
GTIKGVQYKSENGBEKTAHAPLTTVCDGCFSNLRRSLCKPMVDVPSCFVGLVLENCQLPFANHG
HVVLGDPSPILFYPISSTEIRCLVDVPGQKVPSISNGEMEKYLKTIVAPQVPPQIHDAFIAAID
KGNIRTMPNRSMPAAPQPTPGALLMGDAFNMRHPLTGGGMTVALSDIVVLRNLLKPLKDLNDAP
TLCKYLESFYTLRKPVASTINTLAGALYKVFCASPDQARKEMRQACFDYLSLGGIFSNGPVSLL
SGLNPRPLSLVLHFFAVAIYGVGRLLLPFPSPKGIWIGARLVYSASGIIFPIIKAEGVRQMFFP
ATVPAYYRSPPVIKTIA
Cucurbita moschata
(SEQ ID NO: 22)
MMVDHCAFAWILDVVLGLVVAVTFFVAAPRRNRRGGTDSTASKDCVISTAIANGECKPDDADAE
VIIVGAGVAGSALAYTLGKDGRRVHVIERDLTEPDRIVGEFLQPGGYLKLIELGLGDCVEEIDA
QKLYGYALFKDGKNTRVSYPLGNFHSDVSGRSFHNGRFIQRMREKAASLPNVRLEQGTVTSLLE
TKGTIKGVQYKSKNGEEKTAYAPLTIVCDGCFSNLRRSLCKPMVDVPSCFVGLVLENCQLPFAN
HGHVVLGDPSPILFYPISSTEIRCLVDVPGQKVPSISNGDMEKYLKTVVAPQVPPQIHDAFIAA
IEKGNVRTMPNRSMPAAPHPTPGALLMGDAFNMRHPLTGGGMTVALSDIVVLRNLLKPLKDLND
ASTLCKYLESFYTLRKPVASTINTLAGALYKVFCASPDQARKEMRQACFDYLSLGGVFSNGPIS
LLSGLNPRPSSLVLHFFAVAIYGVGRLLLPFPSLKGIWIGARLIYSASGIILPIIKAEGVRQMF
FPATVPAYYRSPPVHKPIT
Cucumis sativus
(SEQ ID NO: 23)
MVDHCTFGWIFSAFLAFVIAFSFFLSPRKNRRGRGTNSTPRRDCLSSSATTNGECRSVDGDADV
IIVGAGVAGSALAHTLGKDGRRVHVIERDLTEPDRIVGELLQPGGYLKLIELGLQDCVEEIDAQ
KVYGYALFKDGKSTRLSYPLENFQSDVSGRSFHNGRFIQRMREKAAFLPNVRLEQGTVTSLLEE
KGTITGVQYKSKNGEQKTAYAPLTIVCDGCFSNLRRSLCNPMVDVPSCFVGLVLENCQLPYANL
GHVVLGDPSPILFYPISSTEIRCLVDVPGQKVPSISNGEMEKYLKTVVAPQVPPQIHDAFIAAI
EKGNIRTMPNRSMPAAPQPTPGALLMGDAFNMRHPLTGGGMTVALSDIVVLRNLLKPLKDLNDA
PTLCKYLESEYTLRKPVASTINTLAGALYKVFCASSDQARKEMRQACFDYLSLGGIESNGPVSL
LSGLNPRPLSLVLHFFAVAIYGVGRLLLPFPSPKGIWIGARLVYSASGIIFPIIKAEGVRQMFF
PATVPAYYRTPPVFNS
Cucurais melo
(SEQ ID NO: 24)
MVDHCAFGWIFSALLAFPIALSLFLSPWRNRRVRGTDSTPRSASVSSSATTNGECRSVDGDADV
VIVGAGVAGSALAHTLGKDGRRVHVIERDLTEPDRIVGELLQPGGYLKLIELGLQDCVEEIDAQ
KVYGYALFKDGKNTRLSYPLENFHSDVSGRSFHNGRFTQRMREKAASLPNVRLEQGTVTSLLEE
KGTITGVQYKSKNGBQKTAYAPLTIVCDGCFSNLRRSLCTPMVDVPSYFVGLVLENCQLPYANL
GHVVLGDPSPILFYPISSTEIRCLVDVPGQKVPSISNGEMEKYLKTVVAPQVPPQIHDAFIAAI
EKGNTRTMPNRSMPAAPQPTPGALLMGDAFNMRHPLTGGGMTVALSDIVVLRNLLKPLKDLNDA
PTLCKYLESFYTLRKPVASTINTLAGALYKVFCASPDQARKEMRQACFDYLSLGGIFSNGPVSL
LSGLNPRPLSLVLHFFAVAIYGVGRLLLPFPSLKGIWIGARLVYSASGIIFPIIKAEGVRQMFF
PATVPAYYRTPPVLNS
Cucurbits maxima
(SEQ ID NO: 25)
MMVEHCAYGWILAAVLGLVVAVTFFVAVPRRNRRGGTDSTASKDCVISPAIANGECEPEDADAD
ADVIIVGAGVAGSALAHTLGKDGRRVHVIERDLTEPDRIVGEFLQPGGHLKLIELCLGDCVEEI
DAQKLYGYALFKDGKNTRVSYPLGNFHSDVSGRSFHNGRFIQRMREKAASLPNVRLEQGTVTSL
LEKKGTIKGVQYKSKNGEEKTAYAPLTIVCDGCFSNLRRSLCKPMVDVPSCFVGLVLENCRLPF
ANHGHVVLGDPSPILFYPISSTEIRCLVDVPGQKVPSIPNGDMEKYLKTVVAPQVPPQIHDAFI
AAIEKGNIRTMPNRSMPAAPHPTPGALLMGDAFNMRHPLTGGGMTVALSDIVVLRNLLKPLKDL
NDAPTLCKYLESYYTLRKPVASTINTLAGALYKVFCASPDQARKEMRQACFDYLSLGGVFSNGP
ISLLSGLNPRPSCLVLHFFAVAIYGVGRLLLPFPSLKGIWIGARLIYSASGIILPIIKAEGVRQ
MFFPATVPAYYRSPPVHKPIT
Ziziphus jujube
(SEQ ID NO: 26)
MLDQCPLGWILASVLGLFVLCNLIVKNRNSKASLEKRSECVKSIATTNGECRSKSDDVDVIIVG
AGVAGSALAHTLGKDGRRLHVIERDLTEPDRIVGELLQPGGYLKLIELGLQDCVEEIDAQRVFG
YALFKDGKDTRLSYPLEKFHSDVSGRSFHNGRFIQRMREKSASLPNVRLEQGTVTSLLEEKGTI
KGVQYKTKTGQELTAFAPLTIVCDGCFSNLRRSLCNPKVDVPSCFVGLVLENCELPYANHGHVI
LADPSPILFYPISSTEVRCLVDVPGQKVPSISNGEMARYLKSVVAPQIPPQIYDAFIAAVDKGN
IRTMPNRSMPASPFPTPGALLMGDAFNMRHPLTGGGMTVALSDIVVLRDLLKPLGDLNDAATLC
KYLESFYTLRKPVASTINTLAGALYKVFCASPDQARKEMRQACFDYLSLGGIFSTGPVSLLSGL
NPRPLSLVLHFFAVAIYGVGRLLLPFPSPKRIWIGARLISGASGIIFPIIKAEGVRQMFFPATV
PAYYRAAPVE
Morus alba
(SEQ ID NO: 27)
MADPYTMGWILASLLGLFALYYLFVNNKNHREASLQESGSECVKSVAPVKGECRSKNGDADVII
VGAGVAGSALAHTLGKDGRRVHVIERDLAEPDRIVGELLQPGGYLKLIELGLQDCVEEIDSQRV
YGYALFKDGKDTRLSYPLEKFHSDVSGRSFHNGRFIQRMREKAASLPNVQLEQGTVTSLLEENG
TIKGVQYKTKTGQELTAYAPLTIVCDGCFSNLRRSLCIPKVDVPSCFVGLVLENCNLPYANHGH
VVLADPSPILFYPISSTEVRCLVDVPGQKVPSISNGEMAKYLKTVVASQIPPQIYDSFVAAVDK
GNIRTMPNRSMPAAPHPTPGALLMGDAFNMRHPLTGGGMTVALSDIVVLRDLLKPLRDLNDSVT
LCKYLESFYTLRKPVASTINTLAGALYKVFCASPDQARKEMREACFDYLSLGGVFSEGPVSLLS
GLNPRPLSLVCHFFAVAIYGVGRLLLPFPSPKRLWIGARLISGASGIIFPIIRAEGVRQMFFPA
TIPAYYRAPRPN
Juglans regia (JrSQE1)
(SEQ ID NO: 28)
MVDPYALGWSFASVLMGLVALYILVDKKNRSRVSSEARSEGVESVTTTTSGECRLTDGDADVII
VGAGVAGSALAHTLGKDGRRVHVIERDLTEPDRIVGELLQPGGYLKLIELGLEDCVEDIDAQRV
FGYALFKDGKNTRLSYPLEKFHSDVSGRSFHNGRFIQRMREKAASLLNVRLEQGTVTSLLEENG
TVKGVQYKTKDGNELTAHAPLTIVCDGCFSNLRRSLCNPQVDVPSSFVGLVLENCELPYANHGH
VILADPSPILFYPISSTEVRCLVDVPGKKVPSIANGEMEKYLKNMVAPQLPPEIYDSFVAAVDR
GNIRTMPNRSMPAAPHPTPGALLMGDAFNMRHPLTGGGMTVALSDIVVLRDLLKPLRDLNDAPT
LCKYLESFYTLRKPVASTINTLAGALYKVFCASPDRARKEMRQACFDYLSLGGVFSMGPVSLLS
GLNPRPLSLVLHFFAVAVYGVGRLLVPFPSPSRIWIGARLISGASAIIFPIIKAEGVRQMFFPA
TVPAYYRAPPVKRDH
Cucumis melo
(SEQ ID NO: 29)
MVDQCALGWILASVLGASALYLLFGKKNCGVLNERRRESLKNIATTNGECKSSNSDGDIIIVGA
GVAGSALAYTLAKDGRQVHVIERDLSEPDRIVGELLQPGGYLKLTELGLEDCVDDIDAQRVYGY
ALFKDGKDTRLSYPLEKFHSDVSGRSFHNGRFIQRMREKAASLPNVRLEQGTVTSLLEENGTIK
GVQYKNKSGQEMTAYAPLTIVCDGCFSNLRRSLCNPKVDVPSCFVGLILENCDLPYANHGHVII
ADPSPILFYPISSTEIRCLVDVPGQKVPSISNGEMANYLKNVVAPQIPPQLYNSFIAAIDKGNI
RTMPNRSMPADPYPTPGALLMGDAFNMRHPLTGGGMTVALSDIVVLRDLLKPLRDLNDAPTLCK
YLEAFYTLRKPVASTINTLAGALYKVFCASPDQARKEMRQACFDYLSLGGIFSNGPVSLLSGLN
PRPLSLVLHFFAVAIYGVGRLLIPFPSPKRVWIGARLISGASAIIFPIIKAEGVRQMFFPKTVA
AYYRAPPVVRER
Cucumis sativus
(SEQ ID NO: 30)
MVDQCALGWILASVLGASALYLLFGKKNCGVSNERRRESLKNIATTNGECKSSNSDGDIIIVGA
GVAGSALAYTLAKDGRQVHVIERDLSEPDRIVGELLQPGGYLKLTELGLEDCVDEIDAQRVYGY
ALFKDGKDTRLSYPLEKFHSDVSGRSFHNGRFIQRMREKAASLPNVRLEQGTVTSLLEENGTIR
GVQYKNKSGQEMTAYAPLTIVCDGCFSNLRRSLCNPKVDVPSCFVGLILENCDLPHANHGHVIL
ADFSPILFYPISSTEIRCLVDVPGQKVPSISNGEMANYLKNVVAPQIPPQLYNSFIAAIDKGMI
RTMPNRSMPADPYPTPGALLMGDAFNMRHPLTGGGMTVALSDIVVLRDLLKPLRDLNDAPTLCK
YLEAFYTLRKPVASTINTLAGALYKVFCASPDQARKEMRQACFDYLSLGGIFSNGPVSLLSGLN
PRPLSLVLHFFAVAIYGVGRLLIPFPSPKRVWIGARLISGASAIIFPIIKAEGVRQMFFPKTVA
AYYRAPPIVRER
Juglans regia (JrSQE2)
(SEQ ID NO: 31)
MVDQYALGLILASVLGFVVLYNLMAKKNRIRVSSEARTEGVQTVITTTNGECRSIEGDVDVIIV
GAGVAGSALAHTLGKDGRKVHVIERDLSEPDRIVGELLQPGGYLKLVELGLQDSVEDIDAQRVF
GYALFKDGKNTRLSYPLEKFHSDVSGRSFHNGRFIQRMREKAASLPNIRLEQGTVTSLLEENGT
IKGVQYKTKDGKELAAHAPLTIVCDGCFSNLRRSLCNPQVDVPSSFVGLVLENCELPYANHGHV
VLADPSPILFYPISSTEVRCLVDVPGQKVPSISNGEMAKYLKTMVAPQVPPEIYDSFVAAVDRG
NIRTMPNRSMPAAPQPTPGALLMGDAFNMRHPLTGGGMTVALSDIVVLRDLLRPLRDLNDAPTL
CKYLESFYTLRKPVASTINTLAGALYKVFCASPDRARNEMRQACFDYLSLGGVFSTGPvSLLSG
LNPRPLSLVLHFFAVAVYGVGRLLVPFPSPSRMWIGARLISGASAIIFPIIKAEGVRQMFFPAT
VPAYYRAPPVNCQARSLKPDALKGL
Theobroma cacao
(SEQ ID NO: 32)
MADSYVWGWILGSVMTLVALCGVVLKRRKGSGISATRTESVKCVSSINGKCRSADGSDADVIIV
GAGVAGSALAHTLGKDGRRVHVIERDLTEPDRIVGELLQPGGYLKLIELGLEDCVEEIDAQQVF
GYALFKDGKHTRLSYPLEKFHSDVSGRSFHNGRFIQRMREKSASLPNVRLEQGTVTSLLEEKGT
IRGVQYKTKDGRELTAFAPLTIVCDGCFSNLRRSLCNPKVDVPSCFVGLVLENCNLPYSNHGHV
ILADPSPILFYPISSTEVRCLVDVPGQKVPSIANGEMANYLKTIVAPQVPPEIYNSFVAAVDKG
NIRTMPNRSMPAAPYPTPGALLMGDAFNMRHPLTGGGMTVALSDIVVLRDLLRPLRDLNDAPTL
CKYLESEYTLRKPIASTINTLAGALYKVFCASPDQARKEMRQACFDYLSLGGVFSTGPISLLSG
LNPRPVSLVLHFFAVAIYGVGRLLLPFPSPKRIWIGARLISGASGIIFPIIKAEGVRQMFFPAT
VPAYYRAPPVE
Cucurbita moschata
(SEQ ID NO: 33)
MMVDHCAFAWTLDVVLGLVVAVTFFVAAPRRNRRGGTDSTASKDCVISTAIANGECKPDDADAE
VIIVGAGVAGSALAYTLGKDGRRVHVIERDLTEPDRIVGEFLQPGGYLKLIELGLGDCVEEIDA
QKLYGYALFKDGKNTRVSYPLGNFHSDVSGRSFHNGRFIQRMREKAASLPNVRLEQGTVTSLLE
TKGTTKGVQYKSKNGEEKTAYAPLTIVCDGCFSNLRRSLCKPMVDVPSCFVGLVLENCQLPFAN
HGHVVLGDPSPILFYPISSTEIRCLVDVPGQKVPSISNGDMEKYLKTVVAPQVPPQIHDAFIAA
IEKGNVRTMPNRSMPAAPHPTPGALLMGDAFNMRHPLTGGGMTVALSDIVVLRNLLKPLKDLND
ASTLCKYLESFYTLRKPVASTINTLAGALYKVFCASPDQARKEMRQACFDYLSLGGVFSNGPIS
LLSGLNPRPSSLVLHFFAVAIYGVGRLLLPFPSLKGIWIGARLIYSASGIILPIIKAEGVRQMF
FPATVPAYYRSPPVHKPIT
Phaseolus vulgaris
(SEQ ID NO: 34)
MLDTYVFGWIICAALSVFVIRNFVFAGKKCCASSETDASMCAENITTAAGECRSSMRDGEFDVL
IVGAGVAGSALAYTLGKDGRQVLVIERDLSEPDRIVGELLQPGGYLKLIELGLEDCVDKIDAQQ
VFGYALFKDGKHIRLSYPLEKFHSDVAGRSFHNGRFIQRMREKAASLPNVRLEQGTVTSLLEEK
GVIKGVQYKTKDSQELSVCAPFTIVCDGCFSNLRRSLCDPKVDVPSCFVGLVLENCELPCANHG
HVILGEPSPVLFYPISSTEIRCLVDVPGQKVPSISNGEMAKYLKTVIAPQVPHELHNAFIAAVD
KGSIRTMPNRSMPAAPYPTPGALLMGDAFNMRHPLTGGGMTVALSDIVVLRNLLRPLRDLNDAP
SLCKYLESFYTLRKPVASTINTLAGALYKVFCASSDPARKEMRQACFDYLSLGGQFSEGPISLL
SGLNPRPLTLVLHFFAVATYGVGRLLLPFPSPKRMWIGLRLISSASGIIMPIIKAEGVRQMFFP
ATVPAYYRNPPAA
Hevea brasiliensis
(SEQ ID NO: 35)
MKMADHYLLGWILASVMGLFAFYYIVYLLVKPEEDNNRRSLPQPRSDFVKTMTATNGECRSDDD
SDVDVIIVGAGVAGAALAHTLGKDGRRVHVIERDLTEPDRIVGELLQPGGYLKLIELGLEDCVE
EIDAQRVFGYALFKDGKHTQLAYPLEKFHSEVAGRSFHNGRFIQRMREKAASLPSVKLEQGTVT
SLLEEKGTIKGVLYKTKTGEELTAFAPLTIVCDGCFSNLRRSLCNPKVDVPSCFVGLVLENCRL
PYANNGHVILADPSPILFYPISSTEVRSLVDVPGQKVPSVSSGEMANYLKNVVAPQVPPEIYDS
FVAAVDKGNIRTMPNRSMPASPYPTPGALLMGDAFNMRHPLTGGGMTVALSDIVVLRDLLKPLR
DLHDAPTLCRYLESFYTLRKPVASTINTLAGALYKVFCASPDEARKEMRQACFDYLSLGGVFST
GPVSLLSGLNPRPLSLVLHFFAVAIYGVGRLLLPFPSPHRIWVGARLISGASGIIFPIIKAEGV
ROMFFPATVPAYYRAPPIKCN
Sorghum bicolor
(SEQ ID NO: 36)
MAAAAAAASGVGFQLIGAAAATLLAAVLVAAVLGRRRRRARPQAPLVEAKPAPEGGCAVGDGRT
DVIIVGAGVAGSALAYTLGKDGRRVHVIERDLTEPDRIVGELLQPGGYLKLIELGLEDCVEEID
AQRVLGYALFKDGRNTKLAYPLEKFHSDVAGRSFHNGRFTQRMRQKAASLPNVQLEQGTVTSLL
EENGTVKGVQYKTKSGEELKAYAPLTIVCDGCFSNLRRALCSPKVDVPSCFVGLVLENCQLPHP
NHGHVILANPSPILFYPISSTEVRCLVDVPGQKVPSIASGEMANYLKTVVAPQIPPEIYDSFIA
AIDKGSIRTMPNRSMPAAPHPTPGALLMGDAFNMRHPLTGGGMTVALSDIVVLRNLLKPLHNLH
DASSLCKYLESFYTLRKPVASTINTLAGALYKVFSASPDQARNEMRQACFDYLSLGGVFSNGPI
ALLSGLNPRPLSLVAHFFAVAIYGVGRLMLPLPSPKRMWIGARLISGACGIILPIIKAEGVRQM
FFPATVPAYYRAAPMGE
Zea mays
(SEQ ID NO: 37)
MRKNLEEAGCAVSDGGTDVIIVGAGVAGSALAYTLGKDGRRVHVIERDLTEPDRIVGELLQPGG
YLKLIELGLQDCVEEIDAQRVLGYALFKDGRNTKLAYPLEKFHSDVAGRSFHNGRFIQRMRQKA
ASLPNVQLEQGTVTSLLEENGTVKGVQYKTKSGEELKAYAPLTIVCDGCFSNLRRALCSPKVDV
PSCFVGLVLENCQLPHPNEGHVILANPSPILFYPISSTEVRCLVDVPCQKVPSIATGEMANYLK
TVVAPQIPPEIYDSFIAAIDKGSIRTMPNRSMPAAPHPTPGALLMGDAFNMRHPLTGGGMTVAL
SDIVVLRNLLKPLRNLHDASSLCKYLESFYTLRKPVASTINTLAGALYKVFSASPDQARNEMRQ
ACFDYLSLGGVFSNGPIALLSGLNPRPLSLVAHFFAVAIYGVGRLMLPLPSPKRMWIGARLISG
ACGIILPIIKAEGVRQMFFPATVPAYYRAAPTGEKA
Medicago sativa
(SEQ ID NO: 38)
MDLYNIGWILSSVLSLFALYNLIFSGKRNYHDVNDKVKDSVTSTDAGDIQSEKLNGDADVIIVG
AGIAGAALAHTLGKDGRRVHIIERDLSEPDRIVGELLQPGGYLKLVELGLQDCVDNIDAQRVFG
YALFKDGKHTRLSYPLEKFHSDVSGRSFHNGRFIQRMREKAASLPNVNMEQCTVISLLEEKGTI
KGVQYKNKDGQALTAYAPLTIVCDGCFSNLRRSLCNPKVDNPSCFVGLILENCELPCANHGHVI
LGDPSPILFYPISSTEIRCLVDVPGTKVPSISNGDMTKYLKTTVAPQVPPELYDAFIAAVDKGN
IRTMPNRSMPADPRPTPGAVLMGDAFNMRHPLTGGGMTVALSDIVVLRNLLKPMRDLNDAPTLC
KYLESFYTLRKPVASTINTLAGALYKVFSASPDEARKEMRQACFDYLSLGGLFSEGPISLLSGL
NPRPLSLVLHFFAVAVFGVGRLLLPFPSPKRVWIGARLLSGASGIILPIIKAEGIRQMFFPATV
PAYYRAPPVNAF
Methylomonas lenta
(SEQ ID NO: 39)
MKEEFDICIIGAGMAGATISAYLAPKGIKIALIDHCYKEKKRIVGELLQPGAVLSLEQMGLSHL
LDGFEAQTVKGYALLQGNEKTTIPYPSQHEGIGLHNGRFLQQIRASALENSSVTQIHGKALQLL
ENERNEIIGVSYRESITSQIKSIYAPLTITSDGFFSNFRAHLSNNQKTVTSYFIGLILKDCEMP
FPKHGHVFLSGPTPFICYPISDNEVRLLIDFPGEQLPRKNLLQEHLDTNVTPYIPECMRSSYAQ
AIQEGGFKVMPNHYMAAKPIVRKGAVMLGDALNMRHPLTGGGLTAVFSDIQILSAHLLAMPDFK
NTDLIHEKIEAYYRDRKRANANLNILANALYAVMSNDLLKTAVFKYLQCGGANAQESIAVLAGL
NRKHFSLIKQFCFLAVFGACNLLQQSISNIPKALKLLKDAFVIIKPLIKNELS
Bathymodiolus azoricus Endosymbiont
(SEQ ID NO: 168)
MHTTSEHNDLFDICIVGAGMAGATIATYLAPRGIKIALIDRDYAEKRRIVGELLQPGAVQTLKK
MGLEHLLEGFDAQPIYGYALFNKDCEFSIEYNQDKSTNYRGVGLHNGRFLQKIREDALKQPSIT
QIHGTVSELIEDENHVVTGVKYKEKYTRELKTVNAKLTITSDGFFSSFRKDLTNNVKTVTSFFV
GIILKDCELPYPHHGHVFLSAPTPFICYPISSTESRLLIDFPGDQAPKKEAVKHHIENNVIPFL
PKEFRLCLDQALRENDYKIMPNHYMPAKPVLKKGvVLLGDALNMRHPITGGGLTAVFNDVYLLS
THLLAMPDFNDTKLIHSKVNLYYNDRYHANTNVNIMANALYGVMSNDLLKQSVFEYLRKGGDNS
GGPISLLAGLNRNPTILIKHFFSVALLCLRNLFKAHKMSLTNAFYVIKDAFCIIVPLAINELRP
SSFLKKNIHN
Methyloprofundus sediment
(SEQ ID NO: 169)
MNTSPEHNDLFDICIVGVGMAGATIAAYLAPRGLKIALIDREYTEKRRIVGELLQPGAVQTLKK
MGLEHLLEGFDAQPIYGYALFNNDKEFSISYNSDDSTEYHGVGLHNGRFLQKIREDVFKNETVT
QIHGTVSELIEDKKGVVKGVTYREKHTREYKTVKAKLTVTSDGFFSNFRKDLSNNVKTVTSFFI
GLVLNDCNLPFPNHGHVFLSAPTPFICYPISSTETRLLIDYPGDKAPKKDEIREHILNKVAPFL
PEEFKECFANAMEDDDFKVMPNHYMPAKPVLKEGAVLLGDALNMRHPLTGGGLTAVFNDVYLLS
THLLAMPDFNDPKLLHEKLELYYQDRYHANTNVNIMANALYGVMSNDLLKQGVFEYLRKGGDNS
GGPITLLAGLNRNPTLLIKHFFSVAFLCICNLSGNNKMNFTNVFRVMKDAFCIIKPLAVNELRP
SSFYKKNIQL
Methylomicrobium buryatense
(SEQ ID NO: 170)
MESNFDICIIGAGMAGATIAAYLAPKGINIALIDHCYKEKKRIVGELLQPGAVLSLEQLGLGHL
LDGIDAQPVEGYALLQGNEQTTIPYPSPNHGMGLHNGRFLQQIRASALQNSSVTQIQGKALSLL
ENEQNEIIGVNYRDSVSNEIKSIYAPLTITSDGFFSNFRELLSNNEKTVTSYFIGLILKDCEIP
VPKHGHVFLSGPTPFICYPISSNEVRLLIDFPGGQFPRKAFLQAHLETNVTPYIPEGMQTSYRH
ALQEDRLKVMPNHYMAAKPKIRKGAVMLGDALNMRHPLTGGGLTAVFSDIEILSGHLLAMPDFN
NNDLIYQKIEAYYRDRQYANANLNILANALYGVMSNELLKNSVFKYLQRGGVNAKESIAILAGL
NKNHYSLMKQFFFVALFGAYTLVRENITNLPKATKILSDALTIIKPLAKNELSLVCIFSDYFKR
Ononis spinosa SQE1
(SEQ ID NO: 177)
MVDPYAVGWIICSLTTIVALYNFVFYRQNRSDKTTPTTTENITTATGDCRSLNPNGDVDIVIVG
AGVAGSALAYTLGKDGRRVLVIERDLNEPDRIVGELLQPGGYLKLIELGLEDCVEKIDAQQVFG
YALFKDGKHTRLSYPLEKFHSDIAGRSFHNGRFIQRMREKAASLPNVQLVQGTVTSLLEENGTI
KGVQYKTKDAQELSACAPLTIVCDGCFSNLRRNLCNPKVEVPSCFVGLVLENCELPCANHGHVI
LGDPSPVLFYPISSTEIRCLVDVPGQKVPSISNGEMAKYLKEVVAPQVPPELHDAFIAAVDKGN
IRTMPNRSMPAAPYPTPGALLMGDAFNMRHPLTGGGMTVALSDIVVLRNLLKPLRDLNDAPSLC
KYLESFYTLRKPVASTINTLAGALYKVFCASPDPARKEMRQACFDYLSLGGLFSEGPVSLLSGL
NPRPLSLVLHFFAVAIYGVGRLLLPFPSPKRIWIGVRLIASASGIILPIIKAEGIRQMFFPATV
PAYYRTPPAA
Ononis spinosa SOE2
(SEQ ID NO: 178)
MDLYLLGWILSSVLSLFALYCLVFDGNRSRANAEKQIQRGYSVTTDAGDVKSEKLNGDADVIIV
GAGIAGAALAETLGKDGRRVRVIERDLSEPDRIVGELLQPGGYLKLVELGLADCVDNIDAQKVE
GYALFKDGKHTRLSYPLEKFHADVSGRSFHNGRFIQRMREKAASLLNVNLEQGTVTSLLEEKGT
IKGVQYKNKDGQELTAYAPLTIVCDGCFSNLRRSLCNPKVDNPSCFVGLVLENCELPCANHGHV
ILGDPSPILFYPISSTEIRCLVDVPGQKVPSISNGDMTKYLKLTVAPQVPPELYDAFIAAVDKG
NIRTMPNKSMPADPCPTPGAVLMGDAFNMRHPLTGGGMTVALSDIVVLRNLLRPLRDLNDAPAL
CKYLESFYTLRKPVASTINTLAGALYKVFSSSPDQARREMRQACFDYLSLGGLFSEGPISLLSG
LNPRPLSLVLEFFAVAVFGVGRLLLPFPSPKRVWIGARLLSAASGIILPIIKAEGIRQMFFPVT
VPAYYRAPPTSQE
Medicago truncatula SQE1
(SEQ ID NO: 179)
MIDPYGFGWITCTLITLAALYNFLFSRKNHSDSTTTENITTATGECRSFNPNGDVDIIIVGAGV
AGSALAYTLGKDGRRVLIIERDLNEPDRIVGELLQPGGYLKLIELGLDDCVEKIDAQKVFGYAL
FKDGKHTRLSYPLEKFHSDIAGRSFHNGRFILRMREKAASLPNVRLEQGTVTSLLEENGTIKGV
QYKTKDAQEFSACAPLTIVCDGCFSNLRRSLCNPKVEVPSCFVGLVLENCELPCADHGHVILGD
PSPVLFYPISSTEIRCLVDVPGQKVPSISNGEMAKYLKTVVAPQVPPELHAAFIAAVDKGHIRT
MPNRSMPADPYPTPGALLMGDAFNMRHPLTGGGMTVALSDIVVLRNLLKPLRDLNDASSLCKYL
ESFYTLRKPVASTINTLAGALYKVFCASPDPARKEMRQACFDYLSLGGLFSEGPVSLLSGLNPC
PLSLVLHFFAVAIYGVGRLLLPFPSPKRLWIGIRLIASASGIILPIIKAEGIRQMFFPATVPAY
YRAPPDA
Medicago truncatula SQE2
(SEQ ID NO: 180)
MDLYNIGWILSSVLSLFALYNLIFAGKKNYDVNEKVNQREDSVTSTDAGEIKSDKLNGDADVII
VGAGIAGAALAHTLGKDGRRVHIIERDLSEPDRIVGELLQPGGYLKLVELGLQDCVDNIDAQRV
FGYALFKDGKETRLSYPLEKFHSDVSGRSFHGRFIQRMREKAASLPNVNMEQGTVISLLEEKGT
IKGVQYKNKDGQALTAYAPLTIVCDGCFSNLRRSLCNPKVDNPSCFVGLILENCELPCANHGHV
ILGDPSPILFYPISSTEIRCLVDVPGTKVPSISNGDMTKYLKTTVAPQVPPELYDAFIAAVDKG
NIRTMPNRSMPADPRPTPGAVLMGDAFNMRHPLTGGGMTVALSDIVVLRNLLKPMRDLNDAPTL
CKYLESFYTLRKPVASTINTLAGALYKVFSASPDEARKEMRQACFDYLSLGGLFSEGPISLLSG
LNPRPLSLVLHEFAVAVFGVGRLLLPFPSPKRVWIGARLLSGASGIILPIIKAEGIRQMFFPAT
VPAYYRAPPVNAF
Hypholoma sublateritium SQE
(SEQ ID NO: 181)
MSKSRSNYDVIIVGAGIAGCALAHGLSTLSRATPLRIAIVERSLAEPDRIVGELLQPGGVMALQ
RLGMEGCLEGIDAVKVHGYCVVENGTSVHIPYPGVHEGRSFHHGRFIMKLREAARAARGVELVE
ATVTELIPREGGKGIAGVRVARKGKDGEEDTTEALGAALVVVADGCFSNFRAAVMGGAAVKPET
KSHFVGAILKDARLPIPNHGTVALVKGFGPVLLYQISEHDTRMLVDVKAPLPADLKVCAHILSN
IVPQLPAALHLPIQRALDAERLRRMPNSFLPPVEQGATRGAVLVGDAWNMRHPLTGGGMTVALN
DVCCLRDLLGSVGDLGDWRQVASTVNILSVALYDLFGADGELQVLRTGCFKYFERGGDCIDGPV
SLLSGIAPSPMLLAYHFFSVAFYSIYVIAVGAQNGSAKQVLAVPGALQYPALCVKGLRVFYTAC
VVFGPLLWTELRW
Hypholoma sublateritium SQE2
(SEQ ID NO: 182)
MHPTHYDVVIVGAGVAGSSLAHALATLPREKPLQIALIERSFEEPDRIVGELLQPGGVDALKTL
KMTSSVEGIDAITVTGYILVESGDMVRTPYPKGKEGRSFHHGRFIMGLRRVALENPNVHPIEAT
AADLIECPCTGQVIGVRATSKTAPAPSSIDAQQTPPAPFSVYGDLVIVADGCFSNFRNVVMGKA
ACKATTKSYFVGTILKDAVLPVAGHGTVILPQGSGPVLLYQISEHDTRMLIDIQHPLPSDLRAH
ILTNILPQLPASIQGVVSDAPTKDRIRRMPNSFLPSVQQGSPLSKKGVILLGDSWNMRHPLTGG
GMTVALNDVVYLRSIFASIQNLDDWDEIRYALRHWHWGRKPLSSTINILSGTLYGLFEKDDDDY
RATRKGCFKYFQLGGKCIDDPVSLLSGLSPSPTLLSSHFFAVTLYAIWVVPTHPRVGSSMSANP
ADVKRVYDIPSADEYPQLTLKGIRMFSQACGVFLPVLWSEIRWWAPCESS
Hypholoma sublateritium SQE3
(SEQ ID NO: 183)
MSKSRSNYDVIIVGAGIAGCALAHGLSTLSRATPLRIAIVERSLAEPDRIVGELLQPGGVMALQ
RLGMEGCLEGIDAVKVHGYCVVENGTSVHIPYPGVHEGRSFHHGRFIMKLREAARAARGVELVE
ATVTELIPREGGKGIAGVRVARKGKDGEEDTTEALGAALVVVADGCFSNFRAAVMGGAAVKPET
KSHFVGAILKDARLPIPNHGTVALVKGFGPVLLYQISEHDTRMLVDVKAPLFADLKAHILSNIV
PQLPAALHLPIQRALDAERLRRMPNSFLPPVEQGATRGAVLVGDAWNMRHPLTGGGMTVALNDV
VVLRDLLGSVGDLGDWRQVRRALHRWHWDRKPLASTVNILSVALYDLFGADGEELQVLRTGCFK
YFERGGDCIDGPVSLLSGIAPSPMLLAYHFFSVAFYSIYVMFAHPQPVAQSKAVGAQNGSAKQV
LAVPGALQYPALCVKGLRVFYTACVVFGPLLWTELRWWTAAEASRGRLLVMSLVPLLLLLGAAN
YGIPGMGLLGVL
M1SQE A4
(SEQ ID NO: 203)
MAKEEFDICIIGAGMAGATISAYLAPKGIKIALIDRCYKEKKRIVGELLQPGAVLSLEQMGLSH
LLDGFEAQTVKGYALLQGNEKTTIPYPSQHEGIGLHNGRFLQQIRASALENSSVTQIHGKALQL
LENERNEIIGVSYRESITSQIKSIYAPLTITSDGFASNFRAHLSNNQKTVTSYFIGLILKDCEM
PFPKHGHVFLSGPTPFICYPISDNEVRLLIDFPGEQLPRKNLLQEHLDTNVTPYIPECMRSSYA
QAIQEGGFKVMPNHYMAAKPIVRKGAVLLGDALNMRHPLTGGGLTAVFSDIQILSAHLLAMPDF
KNTDLIHEKIEAYYRDRKRANANLNILANALYAVMSNDLLKTAVFRYLQCGGANAQESTALLAG
LNRKHFSLIKQYCFLAVFGACNLLQQSISNIPKALKLLKDAFVIIKPLIKNELS
Cucurbitadienol Synthase (CDS), Triterpene Synthase (TTP)
Siraitia grosvenorii CDS
(SEQ ID NO: 40)
MWRLKVGAESVGENDEKWLKSISNHLGRQVWEFCPDAGTQQQLLQVHKARKAFHDDRFHRKQSS
DLFITIQYGKEVENGGKTAGVKLKEGEEVRKEAVESSLERALSFYSSIQTSDGNWASDLGGPMF
LLPGLVIALYVTGVLNSVLSKHHRQEMCRYVYNHQNEDGGWGLHIEGPSTMFGSALNYVALRLL
GEDANAGAMPKARAWILDHGGATGITSWGKLWLSVLGVYEWSGNNPLPPEFWLFPYFLPFHPGR
MWCHCRMVYLPMSYLYGKRFVGPITPIVLSLRKELYAVPYHEIDWNKSRNTCAKEDLYYPHPKM
QDILWGSLHHVYEPLFTRWPAKRLREKALQTAMQHIHYEDENTRYICLGPVNKVLNLLCCWVED
PYSDAFKLHLQRVHDYLWVAEDGMKMQGYNGSQLWDTAFSIQAIVSTKLVDNYGPTLRKAHDFV
KSSQIQQDCPGDPNVWYRHIHKGAWPFSTRDHGWLISDCTAEGLKAALMLSKLPSETVGESLER
NRLCDAVNVLLSLQNDNGGFASYELTRSYPWLELINPAETFGDIVIDYPYVECTSATMEALTLE
KKLHPGHRTKEIDTAIVRAANFLENMQRTDGSWYGCWGVCFTYAGWFGIKGLVAAGRTYNNCLA
IRKACDFLLSKELPGGGWGESYLSCQNKVYTNLEGNRPHLVNTAWVLMALIEAGQAERDPTPLH
RAARLLINSQLENGDFPQQEIMGVFNKNCMITYAAYRNIFPIWALGEYCHRVLTE
Momordica charantia
(SEQ ID NO: 41)
MWRLKVGAESVGENDEKWVKSISNHLGRQVWEFCPDAGTPQQLLQIEKARKAFQDNRFHRKQTS
DLLVSIQCEKGTTNGARVPGTKLKEGEEVRKEAVKSTLERALSFYSSIQTSDGNWASDLGGPME
LLPGLVIALCVTGALNSVLSKHHRQEMCRYLYNHQNEDGGWGLHIESPSTMFGSALNYVALRLL
GEDADGGEGRAMTKARAWILGHGGATAITSWGKLWLSVLGVYEWSGNNPLPPEFWLLPYFLPFE
PGRMWCHCRMVYLPMSYLYGKRFVGPITPVVLSLRKELYTVPYHEIDWNKSRNTCAKEDLYYPH
SKMQDILWGSIHHMYEPLFTHWPAKRLREKALKTAMQHIHYEDENTRYICLGPVNKVLNMLCCW
VEDPYSEAFKLHLQRVHDYLWVAEDGMKMQGYNGSQLWDTAFSVQAIISTKLVDNYGPTLRKAH
DYVKNSQIQQDCPGEPNVWFRHIHKGAWPFSTRDHGWLISDCTAEGLKASLMLSKLPSETVGEP
LERNRLCDAVNVLLSLQNDNGGFASYELTRSYPWLELINPAETFGDIVIDYPYVECTSATMEAL
ALFKKLHPGHRTKEIDTAIARAADFLENMQRTDGSWYGCWGVCETYAGWFGIKGLVAAGRAYSN
CLAIRKACDFLLSKELPGGGWGESYLSCQNKVYTNLEGNRPHLVNTAWVLMALIEAGQGERDPA
PLHRAARLLINSQLENGDFPQEEIMGVFNKNCMITYAAYRNIFPIWALGEYCHRVLTE
Cucurbita maxima
(SEQ ID NO: 42)
MWRLKVGAESVGEKDEKKVKSVSNKLGRQVWEFCADAAADTPHQLLQIQMARNHFHHNRFHRKC
SSDLFLAIQYEKEIAKGAKGGAVKVKEGSEVGKEAVKSTLERALGFYSAVQTSDGNWASDLGGP
MFLLPGLVIALHVTGVLMSVLSKHKRVEMCRYLYNKQNEDGGWGLHIEGTSTMFGSALNYVALR
LLGEDADGGDGGAMTKARAWILERGGATAITSWGKLWLSVLGVYEWSGNNPLPPEFWLLPYSLP
FHPGRMWCHCRMVYLPMSYLYGKRFVGPITPKVLSLRQELYTIPYHEIDWNKSRNTCAKEDLYY
PHPKMQDILWGSIYHVYEPLFTRWPGKRLREKALQAAMKHIHYEDENSRYICLGPVNKVLNMLC
CWVEDPYSDAFKLHLQRVHDYLWVAEDGMRMQGYNGSQLWDTAFSIQAIVATKLVDSYAPTLRK
AHDFVKDSQIQEDCPGDPNVWFRHIHKGAWPFSTRDHGWLISDCTAEGLKASLMLSKLPSTMVG
EPLEKNRLCDAVNVLLSLQNDNGGFASYELTRSYPWLELINPAETFGDIVIDYPYVECTAATME
ALTLFKKLHPGHRTKEIDTAIGKAANFLEKMQRADGSWYGCWGVCFTYAGWFGIKGLVAAGRTY
NSCLAIRKACEFLLSKELPGGGWGESYLSCQNKVYTNLEGNKPHLVNTAWVLMALIBAGQGERD
PAPLHRAARLLMNSQLENGDFVQQEIMGVFNKNCMITYAAYRNIFPIWALGEYCHRVLTE
Citrullus colocynthis (CcCDS1)
(SEQ ID NO: 43)
MWRLKVGAESVGEKEEKWLKSISNHLGRQVWEFCADQPTASPNHLQQIDNARKHFRNNRFHRKQ
SSDLFLAIQNEKEIANGTKGGGIKVKEEEDVRKETVKNTVERALSFYSAIQTNDGNWASDLGGP
MFLLPGLVIALYVTGVLNSVLSKHHRQEMCRYLYNHQNEDGGWGLHIEGTSTMFGSALNYVALR
LLGEDADGGEGGAMTKARGWILDRGGATAITSWGKLWLSVLGVYEWSGNNPLPPEFWLLPYCLP
FHPGRMWCHCRMVYLPMSYLYGKRFVGPITPIVLSLRKELYTIPYHEIDWNKSRNTCAKEDLYY
PHPKMQDILWGSIYHLYEPLETRWPGKRLREKALQMAMKHIHYEDENSRYICLGPVNKVLNMLC
CWVEDPYSDAFKFHLQRVPDYLWIAEDGMRMQGYNGSQLWDTAFSVOAIISTKLIDSFGTTLKK
AHDFVKDSQIQQDFPGDPNVWFRHIHKGAWPFSTRDHGWLISDCTAEGLKASLMLSKLPSKIVG
EPLEKSRLCDAVNVLLSLQNENGGFASYELTRSYPWLELINPAETFGDIVIDYPYVECTSATME
ALTLFKKLHPGHRTKEIDTAVAKAANFLENMQRTDGSWYGCWGVCFTYAGWFGIKGLVAAGRTY
STCVAIRKACDFLLSKELPGGGWGESYLSCQNKVYTNLEGNRPHLVNTAWVLMALIEAGQAERD
PAPLHRAARLLINSQLENGDFPQEEIMGVFNKNCMITYAAYRNIFPIWALGEYFHRVLTE
Citrullus colocynthis (CcCDS2)
(SEQ ID NO: 44)
MWRLKVGAESVGEKBEKWLKSISNHLGRQVWEFCAHQPTASPNHLQQIDNARNHFRNNRFHRKQ
SSDLFLAIQNEKEIANVTKGGGIKVKEEEDVRKETVKNTVERALSFYSAIQTNDGNWASDLGGP
MFLLPGLVIALYVTGVLNSVLSKHHRQEMCRYLYNHQNEDGGWGLHIEGTSTMFGSALNYVALR
LLGEDADGGEGGAMTKARSWILDRGGATAITSWGKLWLSVLGVYEWSGNNPLPPEFWLLPYCLP
FHPGRMWCHCRMVYLPMSYLYGKRFVGPITPIVLSLRKELYTIPYHBIDWNRSRNTCAKEDLYY
PHPKMQDILWGSIYHLYEPLFTRWPGKRLREKALQMAMKHIHYEDENSRYICLGPVNKVLNMLC
CWVEDPYSDAFKFHLQRVPDYLWVAEDGMRMQGYNGSQLWDTAFSVQAIISTKLIDSFGTTLKK
AHDFVKDSQIQQDCPGDPNVWFRHIHKGAWPFSTRDHGWLISDCTAEGLKASLMLSKLPSKIVG
EPLEKSRLCDAVNVLLSLQNENGGFASYELTRSYPWLELINPAETFGDIVIDYPYVECTSATME
ALTLFKKLHPGRRTKEIDIAVARAANFLENMQRTDGSWYGCWGVCFTYAGWFGIKGLVAAGRTY
NSCVAIRKACDFLLSKELPGGGWGESYLSCQNKVYTNLEGNRPHLVNTAWVLMALIEAGQAERD
PAPLHRAARLLINSQLENGDFPQEEIMGVENKNCMITYAAYRNIFPIWALGEYFHRVLTE
Cucurbita moschata
(SEQ ID NO: 45)
MWRLKVGAESVGEKDEKWVKSVSNHLGRQVWEFCADAAAAATPRQLLQIQNARNHFHRNRFHRK
QSSDLFLAIQYEKEIAEGGKGGAVKVKEEEEVGKEAVKSTLERALSFYSAVQTSDGNWASDLGG
PMFLLPGLVIALYVTGVLNSVLSKHHRVEMCRYLYNHQNEDGGWGLHIEGTSTMFGSALNYVAL
RLLGEDADGGDDGAMTKARAWILERGGATAITSWGKLWLSVLGVYEWSGNNFLPPEFWLLPYSL
PFHPGRMWCHCRMVYLPMSYLYGKRFVGPITPKVLSLRQELYTVPYHEIDWNKSRNTCAKEDLY
YPHPKMQDILWGSIYHVYEPLFTRWPGKRLREKALQTAMKHIHYEDENSRYICLGPVNKVLNML
CCWVEDPYSDAFKLHLQRVHDYLWVAEDGMRMQGYNGSQLWDTAFSIQAIVATKLVDSFAPTLR
KAHDFVKDSQIQEDCPGDPNVWFRHIHKGAWPFSTRDHGWLISDCTAEGLKASLMLSKLPSTMV
GEPLEKNRLCDAVNVLLSLQNDNGGFASYELTRSYPWLELINPAETFGDIVIDYPYVECTAATM
FALTLFKKTHPGHRTKETDTAVGKAANFLEKMORADGSWYGCWGVCFTYAGWFGTKGTVAAGRT
YNSCLAIRKACEFLLSKELPGGGWGESYLSCQNKVYTNLEGNKPHLVNTAWVLMALIEAGQGER
DPAPLHRAARLLMNSQLENGDFVQQEIMGVFNKNCMITYAAYRNIFPIWALGEYCHRVLTE
Cucumis sativus
(SEQ ID NO: 46)
MWRLKVGKESVGEKEEKWIKSISNHLGRQVWEFCAENDDDDDDEAVIHVVANSSKHLLQQQRRQ
SSFENARKQFRNNRFHRKQSSDLFLTIQYEKEIARNGAKNGGNTKVKEGEDVKKEAVNNTLERA
LSFYSAIQTSDGNWASDLGGPMFLLPGLVIALYVTGVLNSVLSKHHRQEMCRYIYNHQNEDGGW
GLHIEGSSTMFGSALNYVALRLLGEDANGGECGAMTKARSWILERGGATAITSWGKLWLSVLGV
YEWSGNNPLPPEFWLLPYSLPFHPGRMWCHCRMVYLPMSYLYGKRFVGPITHMVLSLRKELYTI
PYHEIDWNRSRNTCAQEDLYYPHPKMQDILWGSIYHVYEPLFNGWPGRRLREKAMKIAMEHIHY
EDENSRYIYLGPVNKVLNMLCCWVEDPYSDAFKFHLQRIPDYLWLAEDGMRMQGYNGSQLWDTA
FSIQAILSTKLIDTFGSTLRKAHHFVKHSQIQEDCPGDPNVWFRHIHKGAWPFSTRDHGWLISD
CTAEGLKASLMLSKLPSKIVGEPLEKNRLCDAVNVLLSLQNENGGFASYELTRSYPWLELINPA
ETFGDIVIDYSYVECTSATMEALALFKKLHPGHRTKEIDAALAKAANFLENMQRTDGSWYGCWG
VCFTYAGWFGIKGLVAAGRTYNNCVAIRKACHFLLSKELPGGGWGESYLSCQNKVYTNLEGNRP
HLVNTAWVLMALIEAGQGERDPAPLHRAARLLINSQLENGDFPQQEIMGVFNKNCMITYAAYRN
IFPIWALGEYSHRVLTE
Cucumis melo
(SEQ ID NO: 47)
MWRLKVGKESVGEKEEKWIKSISNHLGRQVWEFCSGENENDDDEAIAVANNSASKFENARNHFR
NNRFHRKQSSDLFLAIQCEKEIIRNGAKNEGTTKVKEGEDVKKEAVKNTLERALSFYSAVQTSD
GNWASDLGGPMFLLPGLVIALYVTGVLNSVLSKHHRQEMCRYIYNHQNEDGGWGLHIEGSSTMF
GNWASDLGGPMFLLPGLVIALYVTGVLNSVLSKHHRQEMCRYIYNHQNEDGGWGLHIEGSSTMF
NTCAKEDLYYPHPKMQDILWGSIYHVYEPLFSGWPGKRLREKAMKIAMEHIHYEDENSRYICLG
PVNKVLKMLCCWVEDPYSDAFKFHLQRIPDYLWLAEDGMRMQGYKGSQLWDTAFSIQAIISTKL
IDTFGPTLRKAHHFVKHSQIQEDCPGDPNVWFRHIHKGAWPFSTRDHGWLISDCTAEGLKASLM
LSKLPSKIVGEPLEKNRLCDAVNVLLSLQNENGGFASYELTRSYPWLELINPAETFGDIVIDYS
YVECTSATMEALALFKKLHPGHRTKEIDAAIAKAANFLENMQKTDGSWYGCWGVCFTYAGWFGI
KGLVAAGRTYNNCVAIRKACNFLLSKELPGGGWGESYLSCQNKVYTNLEGNKPHLVNTAWVMMA
LIEAGQGERDPAPLHRAARLLINSQLESGDFPQQEIMGVFNKNCMITYAAYRNIFPIWALGEYS
HRVLDM
Citrullus lanatus subsp. vulgaris
(SEQ ID NO: 48)
DGMWASDLGGPMFLLPGLVIALYVTGVLNSVLSKHHRQEMCRYLYNHQNEDGGWGLHIEGTSTM
PGSALNYVALRLLGEDADGGEGGAMTKARSWILDRGGATAITSWGKLWLSVLGVYEWSGKNPLP
PEFWLLPYCLPFHPGRMWCHCRMVYLPMSYLYGKRFVGPITPIVLSLRKELYTIPYHEIDWNRS
RNTCAKEDLYYPHPKMQDILWGSIYHLYEPLFTRWPGKRLREKALQMAMKHIHYEDENSRYICL
GPVNKVLNMLCCWVEDPYSDAFKFHLQR7PDYLWVAEDGMRMQGYNGSQLWDTAFSVQAIISTK
LIDSFGTTLKKAHDFVKDSQIQQDCPGDPNVWFRHIHKGAWPFSTRDHGWLISDCTAEGLKASL
MLSKLPSEIVGEPLEKSRLCDAVNVLLSLQNENGGFASYELTRSYPWLELINPAETFGDIVIDY
PYVECTSATMEALTLFKKLHPGRRTKEIDIAVARAANFLEMMQRTDGSWYGCWGVCFTYAGWFG
IKGLVAAGRTYNSCVAIRKACDFLLSKELPGGGWGESYLSCQNKVYTNLEGNRPHLVMTAWVLM
ALIEAGQAERDPAPLHRAARLLINSQLEKGDFPQEEIMGVFNKNCMITYAAYRNIFPIWALGEY
FHRVLTE
Theobroma cacao
(SEQ ID NO: 49)
MWRLKIGKESVGDNGAWLRSSNDHVGRQVWEFCPESGTPEELSKVEMARQSFSTDRLLKKHSSD
LLMRIQYAKENQFVTNFPQVKLKEFEDVKEEATLTTLRRALNFYSTIQADDGHWPGDYGGPMFL
LPGLVITLSVTGRLNAVLSKEHQYEMCRYLYNHQNRDGGWGLHIEGPSTMFGTVLNYVTLRLLG
EGFEGGQGAVEKACEWILEHGSATAITSWGKMWLSVLGAYEWSGNNPLPPEVWLCPYFLPIHPG
RMWCHCRMVYLPMSYLYGKRFVGPIITPILSLRKELYAVPYHEVDWNKARNTCAKEDLYYPHPL
VQDILWASLHYLYEPIFTRWPGKSLREKALRTVMQHIEYEGENTRYICIGPVNKVLNMLSCSWE
DPYSESFKLHLPRILDYLWIAEDGMKMQGYNGSQLWDTAFAVQAIISTGLADEYGPILRKAHDF
IKYSQVLEDCPGDLNFWYRHISKGAWPFSTVDHGWPISDCTSEGLKAVLLLSTLPSESVGEPLH
MMRLYDAVMVILSLQNVDGGFPTYELTRSYQWLELIMPAETFGDIVIDYPYVECTSAAIQALIS
FKKLFPEHRMEEIENCIGRAVEFIEKIQAADGSWYGSWGVCFTYAGWFGIKGLSAAGRTYNNSS
NIRKACDFLLSKELATGGWGESYLSCQNKVYTNLEGARPHIVNTSWALLALIEAGQAERDPTPL
HRAARILINSQMEDGDFPQEEIMGVFNKNCMISYSAYRNIFPIWALGEYTCRVLRAP
Ziziphus jujube
(SEQ ID NO: 50)
MWKLKIGAETVGEGGSDGWLRSVNSHLGRQVWEFHPELGTPEELRQIQDARDAFFNHRFHKQHS
SDLLMRIQFAKENPCVANPPQVKVKDTDEVTEESVTTTLRRAINFYSTIQAHDGHWAGDYGGPM
FLLPGLVITLSVTGALNAVLSKEHQCEMCRYIYNRQNEDGGWGLHIEGPSTMFGTVLNYVSLRL
LGEGAEDGLGTIENARKWILDHGGATAITSWGKMWLSVLGVYEWSGNNPLPPEVWLCPYTLPFK
PGRMWCHCRMVYLPMSYLYGKRFVGPITPTIRSLRKELYTAPYHEIDWNRARNECAKEDLYYPH
PLVQDVLWASLHYVYEPIFMRWPAKKLREKALSTVMQHIHYEDENTRYICIGPVNKVLMMLCCW
VEDPMSEAFKLHLPRISDYLWIAEDGMKMQGYNGSQLWDTAFAVQAIVSTDLAEEYGPTIRKAH
EYIKNSQVLEDCPGDLNFWYRHISKGAWPFSTADHGWPISDCTAEGLKAVLLLSQLSSETVGDS
LDVKRLFNAVNVILSLQNGDGGFATYELTRSYQWLELINPAETFGDIVIDYPYVECTSAALEAL
TLFKKSYPGHRREEVENCITNAAMFIENIQAKDGSWYGSWGVCFTYAGWFGIKGLVASGRTYEN
CPSIRKACDFLLSKELPSGGWGESYLSCQNKVYTNLKDNKPHIVNTAWAMLALIVARQAERDPM
PLHRAARILIKSQMHDGDFPQEEIMGVFNKNCMISYAAYRNIFPIWALGEYRLHVLRSL
Prunus avium
(SEQ ID NO: 51)
MWKLKIGAETVGEGGYQWLKSVNNHLGRQVWEFNPELGSPEELQRIEDARKAFWDNRFERRHSS
DLLMRIQFEKENQCVTNLPQLKVKYEEEVTEEVVKTTLRRAISFYSTIQAHDGHWPGDYGGPME
LLPGLVITLSITGALNDVLSKEHQHEMCRYLYNHQNKDGGWGLHIEGPSTMFGTALNYVTLRLF
GEGADDCEGAMELARKWILDHGGVTKITSWGKMWLSVLCTYEWSGNNPLPPEVWLCPYSLPFHP
GRMWCHCRMVYLPMSYLYGKRFVGPITPTIRSLRKELYGVPYHEVDWNQARNLCAKEDLYYPHP
MVQDILWASLHYVYEPVFTRWPAKKLRENALQTVMQHIHYEDENTRYICIGPVNKVLNMLCCWA
EDPNSDAFKLHLPRIPDYLWVAEDGMKMQGYNGSQSWDTSFAVQAIISTNLAEEFCPTLRKAHE
YIKDSQVLEDCPGDLNFWYRHISKGAWPFSTADHGWPISDCTAEGLKAVLLLSKLPTGTVGESL
DMKQLYDAVNVMLSLQNEDGGFATYELTRSYQWLELINPAETFGDIVIDYPYVECTSAAIQALT
MFRKLYPGHRREEIESCIARAAKFIEKIQATDGSWYGSWGVCFTYAGWFGIKGLAAAGRTYKDC
SSIRKACDFLLSKELPSGGWGESYLSCQNKVYTNLKDNRPHIVHTAWAMLALIGAGQAKRDPTP
LHRAARVLINSQMENGDFPQ
Brassica napus
(SEQ ID NO: 52)
MWKLKIAEGGSPWLRTTNNH7GRQFWEFDPNLGTPEELAAVEEARKSFRENRFAKKHSSDLLMR
LQFSRESLSRPVLPQVNIKDSDDVTEKMVETTLKRGVDFYSTIQASDGHNAGDYGGPMFLLPGL
IITLSITGALNTVLSEQHKAEMRRYLHNHQNEDGGWGLHIEGPSTMFGSVLNYVTLRLLGEGPN
DGDGAMEKGRDWILRHGGATNITSWGKMWLSVLGAFEWSGMNPLPPEIWLLPYILPIHPGRMWC
HCBMVYLPMSYLYGKRFVGPITSTVLSLRKELFTVPYHEVDWNEARNLCAKEDLYYPHPLVQDI
LWASLHKIVEPVLTRWPGSNLREKALRTTLEHIHYEDENTRYICIGPVNKVLNMLCCWVEDPNS
EAFKLHLPRIHDYLWVAEDGIKMQGYNGSQLWDTSFAVQAVLATNFREEYGPVLKKAHSYVKNS
QVSEDCPGDLSYWYRHISKGAWPFSTADHGWPISDCTAEGLKAALLLSKVPKEIVGEPVDTKRL
YDAVNVIISLQNADGGFATYELTRSYPWLELINPAETFGDIVIDYPYVECTSAAIQALIAFRKL
YPGHRKKEVDECIEKAVKFIESIQESDGSWYGSWAVCFTYGTWEGVKGLEAAGKTLKNSPTVAK
ACEFLLSKQLPSGGWGESYLSCQDKVYSNLDGNRSHVVNTAWALLSLIGAGQVEVDQKPLHRAA
RYLINAQMESGDFPQQEIMGVFNRNCMITYAAYRNIFPIWALGEYRSKVLLQQGE
Spinacia oleracea
(SEQ ID NO: 53)
MQFAQENSSNVVLPQVKVKDEDEITEETVATTLRRALSYQSTIQAHDGHWPGDYGGPMFLMPGL
VIALSVTGALNAVLSKEHQKEMCRYLYNHQNKDGGWGLHIEGHSTMFGTVLTYVTLRLLGEGVD
DGDGAMERGRKWTLEHGSATATTSWGKMWLSVLGVFEWAGNNPMPPETWLLPYILPVHPGRMWC
HCRMVYLPMSYLYGKREVGPITPTVLSLRRELFDVPYHEIDWDRARNECAKEDLYYPHPLVQDI
LWASLHKAVEPILMRWPGKKLREKALSTVMEHIHYEDENTRYICIGPVNKVLNMLCCWVEDPNS
EAFKLHLPRIPDFLWVAEDGMKMQGYNGSQLWDTTEMVQAILATNLGEEYGGTLRKAHNFIKDS
QVREDCPGDLSYWYRHISKGAWPFSTADHGWPISDCTAEGLKAALLLSKVPSDIVGEPLEVKRL
YDSVNVLLSLQNGDGGFATYELTRSYPWLELINPAETFGDIVIDYPYVECTSAAIQALVSFKRL
YPGHRREEIENCIKKAAKFIEDIQAADGSWYGSWAVCFTYATWFGIKGLVAAGKNYDNCPAIRK
ACDFLLSKQLSNGGWGESYLSCQNKVYSNIEGNKAHVVNTGWAMLALIGAGQAKRDPMPLHRAA
KVLINSQMPNGDFPQQEIMGVFNRNCMITYAAYRNIFPTWALGEYRTQVLQK
Trigonella foenum-graecum
(SEQ ID NO: 54)
MWKLKIAEGGSPWLRTTNNHVGRQIWEFDPNLGTPEQIREVEEARENFWKNRFEQKHSSDLLMR
IQLAKENPMGEVIPKVRVKDVEDVNEESVTTTLRRALNFYSTLQSRDGHWPGDYGGPMFLMPGL
VIALSITGALNAVLTDEHQKEMRRYLYNHQNKDGGWGLHIEGPSTMFGSVLCYVTLRLLGEGPN
DGEGEMEKARDWILEHGGATYITSWGKMWLSVLGVFEWSGNNPLPPEIWLLPYMLPIHPGRMWC
HCRMVYLPMSYLYGKRFVGPITPTVLSLRRELFDVPYHEIDWDRARNECAKEDLYYPHPLVQDI
LWASLHKFVEPIFMNWPGKKLREKAVETVMEHVHYEDENTRYICIGPVNKVLNMLCCWVEDPNS
EAFKLHLPRIPDFLWIAEDGMKMQGYNGSQLWDTTEMVQAILATNLGEEYGGTLRKAHNFIKDS
QVLEDCPGDLSKWYRHISKGAWPFSTADHGWPISDCTAEGLKAVLLLSKIGPEIVGEPLDAKGE
YDAVNVIISLQNEDGGLATYELTRSYKWLEIINPAETFGDIVIDYTYVECTSAAIQALSTFRKL
YPGHRREEIQHCIEKAAAFIEKIQASDGSWYGSWGVCFTYGTWFGVKGLIAAGKSFSNCLSIRK
ACDFLLSKQLPSGCWGESYLSCQNKVYSNLESNRSHVVNTGWAMLALIEAEQAKRDPTPLHHAA
VCLINSQMENGDFPQEEIMGVFNKNCMITYAAYRNIFPIWALGEYRRHVLQA
Ricinus communis
(SEQ ID NO: 55)
MWKLRIAEGSGNPWLRTTNDHIGRQVWEFDSSKIGSPEELSQIENARQNFTKNRFIHKHSSDLL
MRIQFSKENPICEVLPQVKVKESEQVTEEKVKITLRRALNYYSSIQADDGHWPGDYGGPMELMP
GLIIALSITGALNAILSEEHKREMCRYLYNHQNRDGGWGLHIEGPSTMFGSVLCYVSLRLLGEG
PNEGEGAVERGRNWILKHGGATAITSWGKMWLSVLGAYEWSGNNPLPPEMWLLPYILPVHPGRM
NCHCRMVYLPMSYLYGKRFVGPITPTVLSLRKELYTVPYHEIDWNQARNQCAKEDLYYPHPMLQ
DVLWATLHKFVEPILMHWPGKRLREKAIQTAIEHIHYEDENTRYICIGPVNKVLNMLCCWVEDP
NSEAFKLHLPRLYDYLWLAEDGMKMQGYNGSQLWDTAFAVQAIVSTNLIEEYGPTLKKAHSFTK
KMQVLENCPGDLNFWYRHISKGAWPFSTADHGWPISDCTAEGIKALMLLSKIPSEIVGEGLNAN
RLYDAVNVVLSLQNGDGGFPTYELSRSYSWLEFINPAETFGDIVIDYPYVECTSAAIQALTSFR
KSYPEHQREEIECCIKKAAKFMEKIQISDGSWYGSWGVCFTYGTWFGIKGLVAAGKSFGNCSSI
RKACDFLLSKQCPSGGWGESYLSCQKKVYSNLEGDRSHVVNTAWAMLSLIDAGQAERDPTPLHR
AARYLINAQMENGDFPQQEIMGVFNRNCMITYAAYRDIFPIWALGEYRCRVLKAS
Pisum sativum cycloartenol synthase (PsCAS_mut)
(SEQ ID NO: 191)
MAWKLKVAEGGTPWLRTLNNHVGRQVWEFDPHSGSPQDLDDIETARRNFHDNRFTHKHSDDLLM
RLQFAKENPMNEVLPKVKVKDVEDVTEEAVATTLRRGLNFYSTIQSHDGHWPGDLGGPMFLMPG
LVITLSVTGALNAVLTDEHRKEMRRYLYNHQNKDGGWGLHIEGPSTMFGSVLCYVTLRLLGEGP
NDGEGDMERGRDWILEHGGATYITSWGKMWLSVLGVFEWSGNNPMPPEIWLLPYALPVHPGRMW
CHCRMVYLPMSYLYGKRFVGPITPTVLSLRKELPTVPYHDIDWNQARNLCAKEDLYYPHPLVQD
ILWATLHKFVEPVFMNWPGKKLREKAIKTAIEHIHYEDENTRYICIGPVNKVLNMLCCWVEDPN
SEAFKLHLPRIYDYLWVAEDGMKMQGYNGSQLWDTAFAAQALISTNLIDEFGPTLKKAHAFIKN
SQVSEDCPGDLSKWYRHISKGAWPFSTADHGWPISDCTAEGLKAVLLLSKIAPEIVGEPLDSKR
LYDAVNVILSLQNENGGLATYELTRSYTWLEIINPAETFGDIVIDCPYVECTSAAIQALATFGK
LYPGHRREEIQCCIEKAVAFIEKIQASDGSWYGSWGVCFTYGTWFGIKGLIAAGKNFSNCLSIR
KACEFLLSKQLPSGGWAESYLSCQNKVYSNLEGNRSHVVNTGWAMLALIEAEQAKRDPTPLHRA
AVCLINSQLENGDFPQEEIMGVFNKNCMITYAAYRCIFPIWALGEYRRVLQAC
Cucurbita pepo subsp. pepo cycloartenol synthase (CpCAS mut)
(SEQ ID NO: 192)
MAWQLKIGADTVPSDPSNAGGWLSTLNNHVGRQVWHFHPELGSPEDLQQIQQARQHFSDHRFEK
KHSADLLMRMQFAKENSSFVNLPQVKVKDKEDVTEEAVTRTLRRAINFYSTIQADDGHWPGDLG
GPMFLIPGLVITLSITGALNAVLSTEHQREICRYLYNHQNKDGGWGLHIEGPSTMFGSVLNYVT
LRLLGEEAEDGQGAVDKARKWILDHGGAAAITSWGKMWLSVLGVYEWAGNNPLPPELWLLPYLL
PCHPGRMWCHCRMVYLPMCYLYGKRFVGPITPIIRSLRKELYLVPYHEVDWNKARNQCAKEDLY
YPHPLVQDILWATLHHVYEPLFMHWPAKRLREKALQSVMQHIHYEDENTRYICIGPVNKVLNML
CCWAEDPHSEAFKLHIPRIYDYLWIAEDGMKMQGYNGSQLWDTAFAVQAIISTELAEEYETTLR
KAHKYIKDSQVLEDCPGDLQSWYRHISKGAWPFSTADHGWPISDCTAEGLKAVLLLSKLPSEIV
GKSIDEQQLYNAVNVILSLQNTDGGFATYELTRSYRWLELMNPAETFGDIVIDYPYVECSSAAI
QALAAFKKLYPGHRRDEIDNCIAEAADFIESIQATDGSWYGSWGVCFTYGGWFGIRGLVAAGRR
YNNCSSLRKACDFLLSKELAAGGWGESYLSCQNKVYTNIKDDRPHIVNTGWAMLSLIDAGQSER
DPTPLHRAARVLINSQMEDGDFPQEEIMGVFNKNCMISYSAYRNIFPTWALGEYRSRVLKPLK
Zostera marina cycloartenol synthase (ZmCAS mut)
(SEQ ID NO: 193)
MAWKLKVAEGRDARLRTINGHVGROIWEFDPDLGTDNERAEVEAVREKFRNNRFEKKHSSDLLM
RLQLAKENPVSSYLTQVKLEENEDITEEAVTMTLRRALNFHSSIQSFDGHWAGDLGGPMFLMPG
LVISLYITGVLNTVLSSEHQREMCRYLYNHQNEDGGWGLHIEGPSTVFGSTLTYITLRLLGENV
EDGDGAMEKGRKWILDHGGATYITSWGKMWLSVLGVFDWSGNNPLPPEMWLLPYFLPVHPGRMW
CHCRMVYLPMSYLYGKRFVGKITPLVLSLRNEIYTVSYNQIDWNKARNLCAKEDLYYPHPMVQD
LLWATLHKEVEPLLMHWPGTLLREKALNTTMQHLHYEDESTRYICIGPVNKVLNMLCCWVDDPD
SEAFKLHLPRISDYLWIAEDGMKCQGYNGSQLWDTAFAVQAYIATNLSDEFGPVLTKAHEYIKN
SQVPDDCSGDLSFWYRHISKGAWPFSTGDHGWPISDCTAEGLKASLLLSRISPEVVGKPLNAKR
FYDAVNVILSLMNSDGSFATYELTRSYTWLEMINPAETFGDIVIDYPYVECTSAAIQSLVAFTK
LYPGHRREEIDECITKAAKFIESIQKKDGSWYGSWAVCFTYGLWFGIKGLIAAGKTYKNSSAIR
KACEFLLSKQLASGGWGESYLSCQDKVYTNLEGNRAHAVNTGWAMLSLIDAGQAERDPSPLHRA
ARVLINSQMGNGDFPQEEIMGVFNRNCMISYSAYRNIFPIWALGEYRCKVLASKGHE
Artemisia annua (AaCASmut)
(SEQ ID NO: 219)
MAWKLKIAEGGDPWLRTTNDHIGRQIWEFDPTLGSVEELAEIEKLRKTFRDNRFEKKHSADLLM
RSQFAKENSVSVFPPKVNIKDVEDITEDKVTNVLRRAIGFHSTLQADDGHWPGDLGGPMFLLPG
LVITLSITGALNAVLSKEHKREMCRYLYNHQNIDGGWGLHIEGHSTMFGSALNYVTLRLLGEGA
NDGEGAMEKGRKWILDHGGATAITSWGKFWLSVLGVFEWPGNNPLPPEMWLLPYFLPVHPGRMW
CHCRMVYLPMSYLYGKRFVGPITSTVLALRKELFTVPYHDIDWNEARNLCAKEDLYYPHPLIQD
VLWATLDKFVEPVLMSWPGKKLREKALRTAMEHIHYEDENTRYICIGPVNKVLNMLCCWVEDPN
SEAFKLHLPRIQDYLWIAEDGMKMQGYNGSQLWDAAFTVQAIMSTNLIEEFGPTLKKGHIFIKK
SQVLDNCYGDLDYWYRHISKGAWPFSTADHGWPISDCTAEGLKAALLLSKLPSEIVDEPLDAKR
FYDAVNVILSLMNADGSFATYELTRSYSWLELINPAETFGDIVIDYPYVECTSAAIQALVAFKR
LYPGHRRDEVQGCIDKAAAFLEKIQEADGSWYGSWAVCFTYGTWFGVKGLVAAGKNYSNCSSIR
KACNFLLSKQLASGGWGESYLSCVDKVYTNLEGNRSHVVNTGWAMLALIDAEQAKRDPTPLHRA
ARVL.INSQMENGEFPQQEIMGVFNRNCMITYAAYRNIFPIWALGEYRCRVLKVET
Citrullus colocynthis (CcCDS2)
(SEQ ID NO: 220)
MAWRLKVGAESVGEKEEKWLKSISNHLGRQVWEFCAHQPTASPNHLQQIDNARNHFRNNRFHRK
QSSDLELAIQNEKEIANVTKGGGIKVKEEEDVRKETVKNTVERALSFYSAIQTNDGNWASDLGG
PMFLLPGLVIALYVTGVLNSVLSKHHRQEMCRYLYNHQNEDGGWGLHIEGTSTMFGSALNYVAL
RLLGEDADGGEGGAMTKARSWILDRGGATAITSWGKLWLSVLGVYEWSGNNPLPPEFWLLPYCL
PFHPGRMWCHCRMVYLPMSYLYGKRFVGPITPIVLSLRKELYTIPYHEIDWNRSRNTCAKEDLY
YPHPKMQDILWGSIYHLYEPLETRWPGKRLREKALQMAMKHIHYBDENSRYICLGPVNKVLNML
CCWVEDPYSDAFKFHLQRVPDYLWVAEDGMRMQGYNGSQLWDTAFSVQAIISTKLIDSFGTTLK
KAHDFVKDSQIQQDCPGDPNVWFRHIHKGAWPFSTRDHGWLISDCTAEGLKASLMLSKLPSKIV
GEPLEKSRLCDAVNVLLSLQNENGGFASYELTRSYPWLELINPAETFGDIVIDYPYVECTSATM
EALTLFKKLHPGHRTKEIDIAVARAANFLENMQRTDGSwYGCWGVCFTYAGWEG1KGLVAAGRT
YNSCVAIRKACDFLLSKELPGGGWGESYLSCQNKVYTNLEGNRPHLVNTAWVLMALIEAGQAER
DPAPLHRAARLLINSQLENGDFPQEEIMGVFNKNCMITYAAYRNIFPIWALGEYFHRVLTE
Epoxide Hydrolase
Siraitia grosvenorii EPH1 (SgEPH1)
(SEQ ID NO: 56)
MEKIEHSTIATNGINMHVASAGSGPAVLFLHGFPELWYSWRHQLLYLSSLGYRAIAPDLRGFGD
TDAPPSPSSYTAHHIVGDLVGLLDQLGVDQVFLVGDWGAMMAWYFCLFRPDRVKALVNLSVHFT
PRNPAISPLDGFRLMLGDDFYVCKFQEPGVAEADFGSVDTATMFKKFLTMRDPRPPIIPNGFRS
LATPEALPSWLTEEDIDYFAAKFAKTGFTGGFNYYRAIDLTWELTAPWSGSEIKVPTKFIVGDL
DLVYHFPGVKEYIHGGGFKKDVPFLEEVVVMEGAAHFINQEKADEINSLIYDFIKQF
Siraitia grosvenorii EPH2 (SqEPH2)
(SEQ ID NO: 57)
MEKIEHTTISTNGINMHVASIGSGPAVLFLHGFPELWYSWRHQLLELSSMGYRAIAPDLRGFGD
TDAPPSPSSYTAHHIVGDLVGLLDQLGIDQVFLVGHDWGAMMAWYFCLFRPDRVKALVNLSVHE
LRRHPSIKFVDGFRALLGDDFYFCQFQEPGVAEADFGSVDVATMLKKFLTMRDPRPPMIPKEKG
FRALETPDPLPAWLTEEDIDYFAGKFRKTCFTGGFNYYRAFNLTWELTAPWSGSEIKVAAKFIV
GDLDLVYHFPGAKEYIHGGGFKKDVPLLEEVVVVDGAAHFINQERPAEISSLIYDFIKKE
Siraitia grosvenorii EPH3 (SgEPH3)
(SEQ ID NO: 58)
MDQIEHITINTNGIKMHIASVGTGPVVLLLHGFPELWYSWRHQLLYLSSVGYRAIAPDLRGYGD
TDSPASPTSYTALHIVGDLVGALDELGIEKVFLVGHDWGAIIAWYFCLFRPDRIKALVNLSVQE
IPRNPAIPFIEGFRTAFGDDFYMCRFQVPGEAEEDFASIDTAQLFKTSLCNRSSAPPCLPKEIG
FRAIPPPENLPSWLTEEDINYYAAKFKQTGFTGALNYYRAFDLTWELTAPWTGAQIQVPVKFIV
GDSDLTYHFPGAKBYIHNGGFKKDVPLLEEVVVVKDACHFINQERPQEINAHIHDFINKE
Momordica charantia
(SEQ ID NO: 59)
MEKIEHSTIAANGITIHVASVGSGPAVLLLHGFPELWYSWRHQLLFLASKGYRAIAPDLRGFGD
SDAPPSPSSYTPLHIVGDLVALLDHLGIDLVFLVGHDWGAMMAWHFCLLRPDRVKALVNLSVHE
MPRNPAMSPLDGMRLLLGDDFYVCRFQEPGAAEADFGSVDTATMMKKFLTMRDPRPPIIPNGFR
SLETPQALPPWLTEEDIDYFAAKFAKTGFTGGFNYYRAIGRTWELTAPWTGSKIKVPAKFIVGD
LDMVYHLPDAKEYIHGGGFKEDVPLLEEVVVIEGAAHFINQEKPDEISSLIYDFIKKF
Cucurbita moschata
(SEQ ID NO: 60)
MEKIEHSTIATNGINMHVASIGSGPPVLFLHGFPELWYSWRHQLLFLASKGFRAIAPDLRGFGD
SDVPPSPSSYTPFHIIGDLIGLLDHLGIEQVFLVGHDWGAMMAWYFCLFRPDRVKALVNLSVHY
NPRNPAISPLSRTRQFLGDDFYICKFQTPGVAEADFGSVDTATMMKKFLTIRDPSPPIIPNGFK
TLKTPETLPSWLTEEDIDYFASKFTKTGFTGGFNYYRAIEQTWELTGPWSGAKIKVPTKYVVGD
VDMVYHLPGAKQYIHGGGFKKDVPLLEEVVVMEGAAHFINQEKADEISAHIYDFIIKF
Cucurbita maxima
(SEQ ID NO: 61)
MENIEHTIVPTNGINMHIASIGSGPAVLFLHGFPELWYSWRHQLLFLASNGFRAIAPDLRGFGD
TDVPPSPSSYTAHHIVGDLIGLLDHLGIDRVFLVGHDWGAMMAWYFCLFRPDRVRALVNLSVHY
LHRHPSIKFVDGFRAFLGDDFYFCQFQEPGVAEADFGSVDTATMLKKELTMRDPRPPMIPKEKG
FRALETPDPLPSWLTEEDVDYFASKFSKTGFTGGFNYYRAFDLSWELTAPWSGSQVKVPAKFIV
GDLDLVYHFPGAKEYIHGGREKEDVPFLEEVVVIEGAAHFINQERADEISSLIYEEINKE
Prunus persica
(SEQ ID NO: 62)
MEKIEHTTVSTNGINMHIASIGTGPVVLFLHGFPELWYSWRHQLLSLSSLGYRCIAPDLRGFGD
TDAPPSPASYSALHIVGDLIGLLDHLGIDQVFLVGHDWGAVIAWWFCLFRPDRVKALVNMSVAF
SPRNPKRKPVDGFRALFGDDYYICRFQEPCEIEKEFAGYDTTSIMKKFLTGRSPKPPCLPKELC
LRAWKTPETLPPWLSEEDLNYFASKFSKTGFVGGLNYYRALNLTWELTGPWTGLQVKVPVKFIV
GDLDITYHIPGVKNYIHNGGFKRDVPFLQEVVVIEDGAHFINQERPDEISRHVYDFIQKF
Morus notabilis
(SEQ ID NO: 63)
MEKIEHSTVHTNGINMHVASVGTGPAILFLHGFPELWYSWRHQMISLSSLGYRCIAPDLRGYGD
TDAPPSPTSYTSLHIVGDLVGLIDHLVIEKLFLVGHDWGAMIAWYFCLFRPDRIKALVNLSVPE
FPRNPKINFVDGFRAELGDDFYICRFQEPGESEADFSSDTVAVFRRILANRDPKPPLIPKEIGF
RGVYEDPVALPSWLTEDDINHFANKFNETGFTGGLNYYRALNLTWELTAAWTGARVQVPTKFIM
GDLDLVYYFPGMKEYILNGGFKRDVPLLQELVIIEGAAHFINQEKPDEISSHIHHFIQKF
Ricinus communis
(SEQ ID NO: 64)
MEKIEHTTVATNGINMHVAAIGTGPEILFLHGFPELWYSWRHQLLSLSSRGYRCIAPDLRGYGD
TDAPESLTGYTALHIVGDLIGLLDSMGIEQVFLVGHDWGAMMAWYLCMFRPDRIKALVNTSVAY
MSRNPQLKSLELFRTVYGDDYYVCRFQEPGGAEEDFAQVDTAKLIRSVFTSRDPNPPIVPKEIG
FRSLPDPPSLPSWLSEEDVNYYADKFNKKCFTGGLNYYRNIDQNWELTAPWDGLQIKVPVKFVI
GDLDLTYHFPGIKDYIHNGGFKQVVPLLQEVVVMEGVAHFINQEKPEEISEHIYDFIKKE
Citrus unshiu
(SEQ ID NO: 65)
MEKIEHTTVGTNGINMHVASIGTGPVVLFIHGFPELWYSWRNQLLYLSSRGYRAIAPDLRGYGD
TDAPPSVTSYTALHLVGDLIGLLDKLGIHQVFLVGHDWGALIAWYFCLFRPDRVKALVNMSVPF
PPRNPAVRPLNNFRAVYGDDYYICRFQEPGEIEEEFAQIDTARLMKKFLCLRIAKPLCIPKDTG
LSTVPDPSALPSWLSEEDVNYYASKFNQKGFTGPVNYYRCSDLNWELMAPWTGVQLEVPVKFIV
GDQDLVYNNKGMKEYIHNGGFKKYVPYLQEVVVMEGVAHFINQEKAEEVGAHIYEFIKKF
Hevea brasiliensis
(SEQ ID NO: 66)
MEKIEHITVFTNGINMHIASIGTGPEILFLHGFPELWYSWRHQLLSLSSLGYRCIAPDLRGYGD
TDAPQSVNQYTVLHIVGDLVGLLDSLGIQQVFLVGHDWGAFIAWYFCIFRPDRIKALVNTSVAF
MPRNPQVKPLDGLRSMFGDDYYICQFQKPGKAEEDFAQVNTAKLIKLLFTSRDPRPPHFLKEVG
LKALQDPPSQQSWLTEEDVNFYAAKFNQKGFRGGLNYYQNINMNWELAAAWTGVQIKVPVKFII
GDLDLTYHFPGIKEYIHNGGFKKDVPLLQDVWMEGVAHFLNQEKPEEVSKHIYDFIKKF
Handroanthus impetiginosus
(SEQ ID NO: 67)
MDKIQHKIIQTNGINIHVAEIGDGPAVLFLHGFPELWYSWRHQMLFLSSRGYRAIAPDLRGYGD
SDAPPCATSYTAEHLLGDLVGLLDAMGLDRVFLVGHDWGAVMAWYPOLLKPDRLKALVNLSVVF
QPRNPKRKPVESMRAKLGDDYYICRFQEPGEAEEEFARVDTARLIKKLLTTRNPAPPRLPKEVG
FGCLPHKPITMPSWLSEEDVQYYAAKENQKGETGGLNYYRAMDLSWELAAPWTGVQIKVPVKFI
VGDLDITYNTPGVKEYIHKGRFKQHVPFLQELVILEGVAHFLNQEKPDEINQHIYDFIHKF
Camelina sativa
(SEQ ID NO: 68)
MEKIEHTTVSTNGINMHVASIGSGPVILFLHGFPDLWYSWRHQLLSFAALGYRAIAPDLRGYGD
SDAPPSPESYTILHIVGDLVGLLDSLGVDRVFLVGHDWGAIVAWWLCMIRPDRVKALVNTSVVE
NPRNPSVKPVDKFRDLFGDDYYVCRFQETGEIEEDFAQVDTKKLITRFFVSRNPRPPCIPKSVG
FRGLPDPPSLPAWLTEQDVSFYGDKFSQKGFTGGLNYYRAMNLSWELTAPWAGLQIKVPVKFIV
GDLDITYNIPGTKEYIHGGGLKKHVPFLQEVWMEGVGHFLQQEKPDEVTDHIYGFFEKFRTRE
TSSL
Coffea canephora
(SEQ ID NO: 69)
MDKIQHRQVPVNGINLHVAEIGDGPAILFLHGFPELWYSWRHQLLSLSAKGYRALAPDLRGYGD
SDAPPSPSNYTALHIVGDLVGLLDSLGLDRVFLVGHDWGAVMAWYFCLLRPDRIKALVNMSVVF
TPRNPKRKPLEAMRARFGDDYYICRFQEPGEAEEEFARVDTARIIKKFLTSRRPGPLCVPKEVG
FGGSPHNPIQLPSWLSEDDVNYFASKFSQKGFTGGLNYYRAMDLNWELTAPWTGLQIKVPVKFI
VGDLDVTFTTPGVKEYIQKGGFKRDVPFLQELVVMEGVAHFVNQEKPEEVSAHIYDFIQKF
Punica granatum
(SEQ ID NO: 70)
MEKIQHTTVRTNGINMHVATAGSGPDSILEVHGFPELWYTWRHQMVSLAALGYRTIAPDLRGYG
DTDAPPSHESYTAFHIVGDLVGLLDSMGIEKVFLVGHDWGAAIAWYFCLFRPDRIKALVNMSVV
FHPRNPNRKPVDGLRAILGDDYYICRFQAPGEIEEDFARADTANIIKFFLVSRNPRPPQIPKEG
FSCLANSRQMDLPSWLSEEDINYYASKFSEKCFTGGLNYYRVMNLNWELTAPFTCLQIKVPAKE
MVGDLDITYNTPGTKEFIHNGGLKKHVPFLQEVVVMEGVAHFINQEKPEEVTAHIYDFIKKE
Arabidopsis lyrata subsp. lyrata
(SEQ ID NO: 71)
MEKIEHTTVSTNGINMHVASIGSGPVILFLHGFPDLWYSWRHQLLSFAALGYRAIAPDLRGYGD
SDAPPSRESYTILHIVGDLVGLLNSLGVDRVFLVGHDWGAIVAWWLCMIRPDRVNALVNTSVVF
NPRNPSVKPVDAFRALFGDDYYICRFQEPGEIEEDFAQVDTKKLITRFFISRNPRPPCIPKSVG
FRGLPDPPSLPAWLTEEDVSFYGDKFSQKGFTGGLNYYRALNLSWELTAPWAGLQIKVPVKFIV
GDLDITYNIPGTKEYIHEGGLKKHVPFLQEVVVLEGVGHFLHQEKPDEITDHIYGFFKKFRTRE
TASL
Rhinolophus sinicus
(SEQ ID NO: 72)
MDKIEHTTVSTNGINMHVASIGSGPVILFLHGFPDLWYSWRHQLLSFAGLGYRAIAPDLRGYGD
SDSPPSHESYTILHIVGDLVGLLDSLGVDRVFLVGHDWGAVVAWWLCMIRPDRVNALVNTSVVF
NPRNPSVKPVDAFKALFGEDYYVCRFQEPGEIEEDFAQVDTKKLINRFFTSRNPRPPCIPKTLG
FRGLPDPPALPAWLTEQDVSFYADKFSQKGFTGGLNYYRAMNLSWELTAPWAGLQIKVPVKFIV
GDLDITYNIPGTKEYIHEGGLKKHVPFLQEVVVMEGVGHFLHQEKPDEVTDHIYGFFKKE
Gossypium raimondii (GrEPH)
(SEQ ID NO: 184)
MAEKIEHTTVTTNGIKMHVASIGSGPIILFLHGFPELWYTWRHQLLSLSSLGYRCVAPDLRGYG
DSDAPPSPESYTVFHIVGDLVGLLDALGVDKVFLVGHDWGAMIAWNFCLFRPDRIKALVNLSIP
YHPRNPKVKTVDGYRALFGDDFYICRFQVPGEAEAHFAQMDTAKVMKKFLTTRDPNPPCIPRET
GLKALPDPPALPSWLSEDEINYFATKFSQKGFTGGLNYYRAMNLNWELMAPWTGLQIQVPVKFI
VGDLDITYHIPGVKEYLQNGGFKKNVPFLQELVVMEGVAHFINQEKPQEISMHIYDFIKKF
Gossypium hirsutum (GhEPH)
(SEQ ID NO: 185)
MAEKIEHTTVTTNGIKMHVASIGSGPIILFLHGFPELWYTWRRQLLSLSSLGYRCVAPDLRGYG
DSDAPPSPESYTVFHVVGDLVGLLDALGVDKVFLVGHDWGAMIAWNFCLFRPDRIKALVNLSVP
YHPRNPKVKTVDGYRALFGDDFYICRFQVPGEAEAHFAQMDTAKVLKKFLTTRDPNPPCIPKET
GLKALPDPPALPSWLSEDEINYFATKFNQKGFTGGLNYYRAMNLNWELMAPWTGLQIQVPVKFI
VGDLDITYHIPGVKEYLQNGGFKKNVPFLQELVVMEGVAHFINQEKPQEISMHIYDFVKKE
Siraitia grosnevorii (SgEPH4)
(SEQ ID NO: 186)
MAENIEHTTVQTNGIKMHVAAIGTGPPVLLLHGFPELWYSWRHQLLYLSSAGYRAIAPDLRGYG
DTDAPPSPSSYTALHIVGDLVGLLDVLGIEKVFLIGHDWGAIIAWYFCLERPDRIKALVNLSVQ
FFPRNPTTPFVKGFRAVLGDQFYMVRFQEPGKAEEEFASVDIREFFKNVLSNRDPQAPYLPNEV
KFEGVPPPALAPWLTPEDIDVYADKFAETGFTGGLNYYRAFDRTWELTAPWTGARIGVPVKFIV
GDLDLTYHFPGAQKYIHGEGFKKAVPGLEEVVVMEDTSHFINQERPHEINSHIHDFFSKFC
Cucumis melo (CmEPH1)
(SEQ ID NO: 187)
MADKIQHSTISTNGINIHFASIGSGPVVLFLHGFPELWYSWRHQLLFLASKGFRAIAPDLRGFG
DSDAPPSPSSYTPHHTVGDLTGLLDHLGIDQVFLVGHDWGAMMAWYFCLFRPDRVKALVNTSVH
YTPRNPAGSPLAVTRRYLGDDFYICKFOEPGVAEADFGSVDTATMMKKFLTMRDPRPAIIPNGE
KTLLETPEILPSWLTEEDIEYFASKFSKTGETGGFNYYRALDITWELTGPWSRAQIKVPTKEIV
GDLDLVYNFPGAKEYIHGGGFKKDVPLLEDVVVIEGAAHFINQEKPDEISSLIYDFITKE
Cucumis melo (CmEPH2)
(SEQ ID NO: 188)
MAEKIEHTTIPTNGINMHVASIGSGPAVLFLHGFPQLWYSWRHQLLFLASKGFRALAPDLRGFG
DTDAPPSPSSYTFLHIIGDLIGLLDHLGLEKVFLVGHDWGAMIAWYFCLFRPDRVKALVNLSVY
YIKRHPSISFVDGFRAVAGDNFYICQFQEAGVAEADFGRVDTATMMKKFMGMRDPEAPLIFTKE
KGFSSMETPDPLPCWLTEEDIDFFATKFSKTGFTGGFNYYRALNLSWELTAAWNGSKIEVPVKE
IVGDLDLVYHFPGAKQYIHGGEFKKDVPFLBEVVVIKDAAHFIHQEKPHQINSLIYHFINKFST
STSPA
Trema orientals (ToEPH)
(SEQ ID NO: 189)
MAEKIEHTTINTNGVNLHVASIGTGPAVLFLHGFPELWYSWRHQMLALSSLGYRAIAPDLRGYG
DSDAPPSPESYSSLHIVGDLVGLIDQLGIDQIFLVGHDWGAVIAWQFCLFRFDRVKALVNMSVP
FRPRHPTRKPIETFRALFGDDYYVCRFQAPGEVEEDFASDDTANLLKKFYGGRNPRPPCVPKEI
GFKGLKAPELPSWLSEEDLNYFAEKFNQRGFTGGLNYYRALDLTWELTAAWTGVQVKVPTKEIV
GDLDITYHIPGAKEYINEGGLKKDVPYLQEVVVMEGVAHFVNQEKAEEVSAHIHDFIKKF
Arachis hypogaea (AhEPH)
(SEQ ID NO: 190)
MAEKTEHTWVNTNGIKMHVASIGSGPAVLFLHGFPELWYSWRHQLLSLSAQCYRCIAPDLRGYG
DTDAPPSPSSYSALHIVSDLVGLLDALRIDQVFLVGHDWGAAMAWYFCLFRPDRIKALVNMSVV
FRPRNPKWKPLQSLRAMLGDDYYICRFQKPGEAEEEFARAGTSRIIKTFLVSRDPRPPCVPKEI
GFGGSPNLQLALPSWLTEEDVNYYASKFDQKGFTGGLNYYRAIDLTWELTAPWTGVQIKVPVKE
IVGDLDVTYNTPGVKEYIHGGGFKKEVPFLQELVVMEGVAHFINQERPDEISAHIHDFIKKF
Mycobacterium tuberculosis (MtEPH)
(SEQ ID NO: 212)
MASQVHRILNCRGTRIHAVADSPPDQQGPLVVLLHGFPESWYSWRHQIPALAGAGYRVVAIDQR
GYGRSSKYRVQKAYRIKELVGDVVGVLDSYGAEQAFVVGHDWGAPVAWTFAWLHPDRCAGVVGI
SVPFAGRGVIGLPGSPFGERRPSDYHLELAGPGRVWYQDYFAVQDGIITEIEEDLRGWLLGLTY
TVSGEGMMAATKAAVDAGVDLESMDPIDVIRAGPLCMAEGARLKDAFVYPETMPAWFTEADLDF
YTGEFERSGFGGPLSFYHNIDNDWHDLADQQGKPLTPPALFIGGQYDVGTIWGAQAIERAHEVM
PNYRGTHMIADVGHWIQQEAPEETNRLLLDFLGGLRP
Cytochrome P450
Siraitia grosvenorii CYP87D18
(SEQ ID NO: 73)
MWTVVLGLATLFVAYYIHWINKWRDSKFNGVLPPGTMGLPLIGETIQLSRPSDSLDVHPFIQKK
VERYGPIFKTCLAGRPVVVSADAEFNNYIMLQEGRAVEMWYLDTLSKFFGLDTEWLKALGLIHK
YIRSITLNHFGAEALRERFLPFIEASSMEALHSWSTQPSVEVKNASALMVFRTSVNKMFGEDAK
KLSGNIPGKFTKLLGGFLSLPLNFPGTTYHKCLKDMKEIQKKLREVVDDRLANVGPDVEDFLGQ
AFKDKESEKFISEEFIIQLLFSISFASFESISTTLTLILKLLDEHPEVVKELEVEHEAIRKARA
DPDGPITWEEYKSMTFTLQVINETLRLGSVTPALLRKTVKDLQvKGKIIPEGWTIMLVTASRHR
DPKVYKDPHIFNPWRWKDLDSITIQKNFMPFGGGLRHCAGAEYSKVYLCTFLHILCTKYRWTKL
GGGTIARABIL SFE DGLHVKFTPKE
Cucumis melo
(SEQ ID NO: 74)
MWTILLGLATLAIAYYIHWVNKWKDSKENGVLPPGTMGLPLIGETIQLSRPSDSLDVHPFIQSK
VKRYGPIFKTCLAGRPVVVSTDAEFNHYIMLQEGRAVEMWYLDTLSKFFGLDTEWLKALGLIHK
YIRSITLNHFGAESLRERFLPRIEESARETLHYWSTQPSVEVKESAAAMVFRTSIVKMFSEDSS
KLLTAGLTKKFTGLLCGFLTLPLNVPGTTYHKCIKDMKEIQKKLKDILEERLAKCVSIDEDFLC
QAIKDKESQQFISEEFIIQLLFSISFASFESISTTLTLILNFLADHPDVAKELEAEHEAIRKAR
ADPDGPITWEEYKSMNFTLNVICETLRLGSVTPALLRKTTKEIQIKGYTIPEGWTVMLVTASRH
RDPEVYKDPDTFNPWRWKELDSITIQRNFMPFGGGLRHCAGAEYSKVYLCTFLHILETKYRWRK
LKGGKIARAHILRFEDGLYVNFTPKE
Cucurbita maxima
(SEQ ID NO: 75)
MWTIVVGLATLAVAYYIHWINKWKDSKFNGVLPPGTMGLPLIGETLQLSRPSDSLDVHPFIKKK
VKRYGSIFKTCLAGRPVVVSTDAEFNNYIMLQEGRAVEMWYLDTLSKFFGLDTEWLKALGFIHK
YIRSITLNHFGAESLRERFLPRIEESAKETLCYWATQPSVEVKDSAAVMVFRTSMVKMVSKDSS
KLLTGGLTKKFTGLLGGFLTLPINVPGTTYNKCMKDMKEIQKKLREILEGRLASGAGSDEDFLG
QAVKDKGSQKFISDDFIIQLLFSISFASFESISTTLTLLLNYLADHPDVVKELEAEHEAIRNAR
ADPDGPITWEEYKSMTFTLHVIFETLRLGSVTPALLRKTTKELQINGYTIPEGNTVMLVTASRE
RDPAVYKDPHTFNPWRWKELDSITIQKNFMPFGGGLRHCAGAEYSKVYLCTFLHILFTKYRWTK
LKGGKVARAHILSFEDGLHMKFTPRE
Cucumis sativus
(SEQ ID NO: 76)
MWTILLGLATLAIAYYIHWVNKWKDSKFNGVLPPGTMGLPLIGETIQLSRPSDSLDVHPFIQRK
VKRYGPIFECTCLAGRPWVSTDAEFNHYIMLQEGRAVEMWYLDTLSKFFGLDTEWLKALGLIHK
YIRSITLNHFGAESLRERFLPRIEESARETLHYWSTQTSVEVKESAAAMVFRTSIVKMFSEDSS
KLLTEGLTKKFTGLLGGFLTLPLNLPGTTYHKCIKEMKQIQKKLKDILEERLAKGVKIDEDFLG
QAIKDKESQQFISEEFIIQLLFSISFASFESISTTLTLIINFLADHPDVVKELEAEHEAIRKAR
ADPDGPITWEEYKSMNFTLNVICETLRLGSVTPALLRKTTKEIQIKGYTIPEGWTVMLVTASRH
RDPEVYKDPDTFNPWRWKELDSITIQKNFMPFGGGLRHGAGAEYSKVYLCTFLHILFTKYRWRK
LKGGKIARAHILRFEDGLYVNFTPKE
Cucurbita moschata
(SEQ ID NO: 77)
MWAIVVGLATLAVAYYIHWINKWRDSRFNGVLPPGTMGLPLVGETLQLARPSDSLDVHPFIRRR
VKRYGSIFKTCLAGRPVVVSTDAEFNNYIMLQEGRAVEMWYLDTLSKFFGLDTEWLKALGFIHK
YIRSITLNHFGAESLRERFLPRIEESAKETLRYWATQPSVEVKDSAAVMVFRTSMVKMVSEDSS
KLLTGGLTKKFTGLLGGFLTLPINVPGTTYNKCMKDMKEIQKKLREILEGRLASGAGSDEDFLG
QAIKDKGSQQFISDDFIIQLLFSISFASFESISTTLTLVLNYLADHPDVVKELEAEHEAIRNAR
ADPDGPITWEEYKSMTETLHVIFETLRLGSVTPALLRKTTKELQINGYTIPEGWTVMLVTASRH
RDPAVYKDPHTFNPWRWKELDSITIQKNFMPFGGGLRHCAGAEYSKVYLCTFLHILETKYRWTK
LKGGRVARAHILSFEDGLHVRFTPRE
Prunus avium
(SEQ ID NO: 78)
MWTLVGLSLVALLVIYFTHWIIKWRNPKCNGVLPPGSMGLPLIGETLNLIIPSYSLDLHPFIKR
RLQRYGPIFRTSLAGRPVVVTADPEFNNYIFQQEGRMVELWYLDIFSKIFVHEGDSKTNAIGMV
HKYVRSIFLNEFGAERLKEKLLPQIEEFVNKSLCAWSSKASVEVKHAGSVMVFNFSAKQMISYD
AEKSSDDLSEKYTKIIDGLMSFPLNIPGTAYYNCSKHQKNVTTMLRDMLKERRISPETRRGDFL
DQLSIDMEKEKFLSEDFSVQLVFGGLFATFESISAVIALAFSLLADHPSVVEELTAEHEAILKN
RENPNSSITWDEYKSMTFTLQVINEILRLGNVAPGLLRRALKDIPVKGFTIPEGWTIMVVTSAL
QLSPNTFEDPLEFNPWRWKDLDSYAVSRNFMPFGGGMRQCAGAEYSRVFLATFLHVLVTRYRWT
TIKAARIARNPILGFGDGIHIKFEEKRT
Populus trichocarpa
(SEQ ID NO: 79)
MWAIGLVVVAIVVIYYTHMIFKWRSPKIEGVLPPGSMGWPLIGETLQEISPGKSLDLHPEVKKR
MEKYGPIFKTSLVGRPIIVSTDYEMNKYILQHEGTLVELWYLDSFAKFFALEGETRVNAIGTVH
KYLRSITLNHFGVESLKESLLPKIEDMLHTNLAKWASQGPVDVKQVISVMVFNFTANKIFGYDA
ENSKEKLSENYTKILNSFISLPLNIPGTSFHKCMQDREKMLKMLKDTLMERLNDPSKRRGDFLD
QAIDDMKTEKFLTEDFIPQLMFGILFASFESMSTTLTLTFKFLTENPRVVEELRAEHEAIVKKR
ENPNSRLTWEEYRSMTFTQMVVNETLRISNIPPGLFRKALKDFQVKGYTVPAGWTVMLVTPATQ
LNPDTFKDPVTFNPWRWQELDQVTISKNFMPFGGGTRQCAGAEYSKLVLSTFLHILVTNYSFTK
IRGGDVSRTPIISFGDGIHIKFTARA
Primus persica
(SEQ ID NO: 80)
MWTLVGLSLVGLLVIYFTHWIIKWRNPKCNGVLPPGSMGLPFIGETLNLIIPSYSLDLHPFTKK
RLQRYGPIFRTSLAGRQVVVTADPEFNNYLFQQEGRMVELWYLDTFSKIFVHEGESKTNAVGMV
HKYVRSIFLNHFGAERLKEKLLPQIEEFVNKSLCAWSSKASVEVKHAGSVMVFNFSAKQMISYD
AEKSSDDLSEKYTKIIDGLMSFPLNIPGTAYYNCLKHQKNVTTMLRDMLKERQISPETRRGDFL
DQISIDMEKEKFLSEDFSVQLVFGGLFATFESISAVLALAFSLLAEHPSVVEELTAEHEAILKN
RENLNSSLTWDEYKSMTFTLQVINEILRLGNVAPGLLRRALKDIPVKGFTIPEGWTIMVVTSAL
QLSPNTFEDPLEFNPWRWKDLDSYAVSKNFMPFGGGMRQCAGAEYSRVFLATFLHVLVTKYRWT
TIKAARIARNPILGFGDGIHIKFEEKKT
Populus euphratica
(SEQ ID NO: 81)
MWTFVLCVVAVLVVYYIHWINKWRNPTCNGVLPPGSMGLPLLGETLELLLPSYSLDLHPFLKKR
IQRYGPIFRTNILGRPAVVSADPEINSYIFQNEGKLVEMWYMDTFSKLFAQSGESRTNAFGIIE
KYARSLTLTHFGSESLKERLLPQVENIVSKSLQMWSSDASVDVKPAVSIMVCDFTAKQLFGYDA
ENSSDKISEKFTKVIDAFMSLPLNIPGTTYHKCLKDKDSTLSILRNTLKERMNSPAESRGGDFL
DQIIADMDKEKFLTEDFTVNLIFGILFASFESISAALTLSLKLIGDHPSVLEELTVEHEAILKN
RENPDSPLTWAEYNSMTFSLQVINETLRLGNVAPGLLRRALQDMQVKGYTIPAGWVIMVVNSAL
HLNPATFKDPLEFNPWRWKDFDSYAVSKNLMPFGGGRRQCAGSEFTKLFMAIFLHKLVTKYRWN
IIKQGNIGRNPILGEGDGIHISFSPKDI
Juglans regia
(SEQ ID NO: 82)
MWKVGLCVVGVIVVWFTRWINKWRNPKCNGILPPGSMGPPLIGESLQLIIPSYSLDLHPFIKKR
VQRYGPIFRTSVVGQPMVVSTDVEFNHYLAKQEGRLVHFWYLDSFAEIFNLEDENAISAVGLIH
KYGRSIVLNHFGTDSLKKTLLSQIEEIVNKTLQTWSSLPSVEVKHAASVMAFDLTAKQCFGYDV
ENSAVKMSEKFLYTLDSLISFPFNIPGTVYHKCLKDKKEVLNMLRNIVKERMNSPEKYRGDFLD
OTTADMNKESFLTQDFIVYLLYGLLFASFESISASLSLTLKTLARHPAVLQQLTAFHEAILKNR
DNPNSSLTWDEYKSMTETFQVINEALRLGNVAPGLLRRALKDIEFKGYTIPAGWTIMLANSAIQ
LNPNTYEDPLAFNPWRWQDLDPQIVSKNFMPFGGGIRQCAGAEYSKTFLATFLHVLVTKYRWTK
VKGGKMARNPILWFADGIHINFALKHN
Pyrus x bretschneideri
(SEQ ID NO: 83)
MWDVVGLSFVALLVIYLTYWITQWKNPKCNGVLPPGSMGLPLIGETLNLLIPSYSLDLHPFIRK
RLERYGPIFRTSLAGKPVLVSADPEFNNYVLKQEGRMVEEWYLDTFSKIFMQEGGNGTNQIGVI
HKYARSIFLNEFGAECIKEKLLTQIEGSINKHLRAWSNQESVEVKKAGSIMALNFCAEHMIGYD
AETATENLGEIYHRVFQGLISFPLNVPGTAYHNCLKIHKKATTMLRAMLRERRSSPEKRRGDFL
DQIIDDLDQEKFLSEDFCIHLIFGGLFAIFESISTVLTLFFSLLADHPAVLQELTAEHEALLKN
REDPNSALTWDEYKSMTFTLQVINETLRLVNTAPGLLRRALKDIPVKGYTIPAGWTILLVTPAL
HLTSNTFKDHLEFNPWRWKDLDSLVISKNFMPFGSGLRQCAGAEFSRAYLSTFLHVLVTKYRWT
TIKGARISRRPMLTFGDGAHIKFSEKKN
Morus notabilis
(SEQ ID NO: 84)
MWNTICLSVVGLVVIWISNWIRRWRNPKCNGVLPPGSMGEPLIGETLPLIIPTYSLDLHPFIKN
RLQRYGSIFRTSIVGRPVVISADPEFNNFLFQQEGSLVELYYLDTFSKIFVHEGVSRTNEFGVV
HKYIRSIFLNHFGAERLKEKLLPEIEQMVNKTLSAWSTQASVEVKHAASVLVLDFSAKQIISYD
AKKSSESLSETYTRIIQGFMSFPLNIPGTAYNQCVKDQKKIIAMLRDMLKERRASPETNRGDFL
DQISKDMDKEKFLSEDFVVQLIFGGLFATFESVSAVLALGFMLLSEHPSVLEEMIAEHETILKN
REHPNSLLAWGEYKSMTFTLQVINETLRLGNVAPGLLRKALKDIRVKGFTIPKGWAIMMVTSAL
QLSPSTFKNPLEFNPWRWKDLDSLVISKNFMPFGRGMRQCAGAEYSRAFMATFFHVLLTKYRWT
TIKVGNVSRNPILRFGNGIHIKFSKKN
Jatropha curcas (JcP450.1)
(SEQ ID NO: 85)
MWIIGLCFASLLVIYCTHFFYKWRNPKCKGVLPPGSMGLPIIGETLQLIIPSYSLDHHPFIQKR
IQRYGPIFRTNLVGRPVIVSADPEVNQYIFQQEGNSVEMWYLDAYAKIFQLDGESRLSAVGRVH
KYIRSITLNNFGIENLKENLLPQIQDLVNQSLQKWSNKASVDVKQAASVMVFNLTAKQMFSYGV
EKNSSEEMTEKFTGIFNSLMSLPLNIPGTTYHKCLKDREAMLKMLRDTLKQRLSSPDTHRGDFL
DQAIDDMDTEKFLTGDCIPQLIFGILLAGFETTATTLTLAFKFLAEHPLVLEELTAEHEKILSK
RENLESPLTWDEYKSMTFTHHVINETLRLANFLPGLLRKALKDIQVKNYTIPAGWTIMVVKSAM
QLNPEIYKDPLAFNPWRWKDLDSYTVSKNFMPFGGGSRQCAGADYSKLFMTIFLHVLVTKYRWR
KIKGGDIARNPILGFGDGLHIEVSAKN
Hevea brasiliensis
(SEQ ID NO: 86)
MLTVVLLLVGFFIIYYTYWISKWRNPNCNGVLPPGSMGFPLIGETLQLLIPSYSLDLHPFIKKR
IHRYGPIFRSNLAGRPVIVSADPEFNYYILSQEGRSVEIWYLDTFSKLFRQQGESRTNVAGYVH
KYLRGAFLSQIGSENLREKLLLHIQDMVNRTLCSWSNQESVEVKHSASLAVCDFTAKVLFGYDA
EKSPDNLSETFTRFVEGLISFPLNIPRTAYRQCLQDRQKALSILKNVLTDRRNSVENYRGDVLD
LLLNDMGKEKFLTEDFICLIMLGGLFASFESISTITTLLLKLFSAHPEVVQELEAEHEKILVSR
HGSDSLSITWDEYKSMTFTHQVINETLRLGNVAPGLLRRAIKDVQFKGYTIPSGWTIMMVTSAQ
QVNPEVYKDPLVFNPWRWKDFDSITVSKNFTPFGGGTRQCVGAEYSRLTLSLFIHLLVTKYRWT
KIKEGEIRRAPMLGFGDGIHFKFSEKE
Jatropha curcas (JcP450.2)
(SEQ ID NO: 87)
MKRAIYICLARITKQGLSLIEMLMTELLFGAFFIIFLTYWINRWRNPKCNGVLPPGSMGLPLLC
ETLQLLIPRYSLDLHPFIRKRIQRYGPIFRSNVAGRPIVETADPELNHYIFIQERRLVELWYMD
TFSNLFVLDGESRPTGATGYIHKYMRGLFLTHFGAERLKDKLLHQIQELIHTTLQSWCKQPTIE
VKHAASAVICDFSAKFLFGYEAEKSPFNMSERFAKFAESLVSFPLNIPGTAYHQSLEDREKVMK
LLKNVLRERRNSTKKSEEDVLKQILDDMEKENFITDDFIIQILFGALFAISESIPMTIALLVKF
LSAQPSVVEELTAEHEEILKNKKEKGLDSSITWEDYKSMTFTLQVINETLRIANVAPGLLRRTL
RDIHYKGYTIPAGWTIMVLTSSRHMNPEIYKDPVEFNPWRWKDLDSQTISKNFTPFGGGTRQCA
GAEYSRAFISMFLHVLVTKYRWKNVKEGKICRGPILRIEDGIHIKLYEKH
Chenopodium quinoa
(SEQ ID NO: 88)
MWPTMGLYVATIVAICFILLELKRRNSREKQVVLPPGSKGFPLIGETLQLLVPSYSLDLPSFTR
TRIQRYGPIFKTRLVGRPVVMSADPGFNRYIVQQEGKSVEMWYLDTFSKLFAQDGEARTTAAGL
VHKYLRNLTLSHFGSESLRVNLLPHLESLVRNTLLGWSSKDTIDVKESALTMTIEFVAKQLFGY
DSDKSKEKIGEKFGNISQGLFSLPLNIPGTTYHSCLKSQREVMDMMRTALKDRLTTPESYRGDF
LDHALKDLSTEKFLSEEFILQIMFGLLFASSESTSMTLTLVLKLLSENPHVLKELEAEHERIIK
NKESPDSPLTWAEVKSMTFTLQVINESLRLGNVSLGILRRTLKDIEINGYTIPAGWTIMLVTSA
CQYNSDIYKDPLTFNPWRWKEMQPDVIAKNFMPFGGGTRQCAGAEFAKVLMTIFLHNLVTNYRW
EKIKGGEIVRTPILGFRNALRVKLTKKN
Spinacia oleracea
(SEQ ID NO: 89)
MVLLPGSKGFPFIGETLQLLLPSYSLDLPSEIRTRIQRYGPIEQTRLVGRPVVVSADPGFNRYI
VQQEGKMVEMWYLDTFSKIFAQQGEGRTNAAGLVHKYLRNITFTHFGSQTLRDKLLPHLEILVR
KTLHGWTSQESIDVKEAALTMTIEFVAKQLFGYDSDKSKERIGDKFANISQGLLSFPLNIPGTT
YHSCLKSQREVMDMMRKTLKERLASPDTCQGDFLDHALKDLNTDKFLTEDFILQIMFGLLFASS
ESTSITLTLILKFLSENPHVLEELEVEHERILKNRESPDSPLTWAEVKSMTFTLQVINESLRLG
NVSLGLLRRTLKDIEINGYTIPAGWTIMLVTSACQYNSDVYKDPLTFNPWRWKEMQPDVIAKNE
MPFGGGTRQCAGAEFAKVLMTIFLHVLVTTYRWEKIKGGEIIRTPILGFRNGLHVKLIKKARLS
Manihot esculenta
(SEQ ID NO: 90)
MEMWSVWLYIISLIIIIATHWTYRWRNPKCNGKLPPGSMGIPPIGETIQFLIPSKSLDVPNFIK
KRMNKYGPLFRTNLVGRPVIVSSDPDFNYYLLQREGKLVERWYMDSFSKLLHHDVTQIIIKHGS
IHKYLRNLVLGHFGPEPLKDKLLPQLESAISQRLQDWSKQPSIEAKSASSAMIFDFTAKILFSY
EPEKSGENIGEIFSNFLQGLMSIPLNIPGTAFHRCLKNQKRAIQMITEILKERRSNPEIHKGDF
LDQIVEDMKKDSFWTEEFATYMMFGLLLASFETISSTLALAIIFLTDNPPVVQKLTEEHEAILK
ARENRDSGLSWKEYKSLSYTHQVVNESLRLASVAPGILRRAITDIQVDGYTIPKGWTIMVVPAA
VQLNPNTFEDPLVFNPSRWEDMGAVAMAKNFIAFGGGSRSCAGAEFSRVLMSVFVHVFVTNYRW
TKIKGGDMVRSPALGFGNGFHIRVSEKQL
Olea europaea var. sylvestris
(SEQ ID NO: 91)
MAALDLSTVGYLIVGLLTVYITHWIYKWRNPKCNGVLPPGSMGLPLIGETIQLVIPNASLDLPP
FIKKRMKRYGPIFRTNVAGRPVIITADPEFNHFLLRQDGKLVDTWSMDTFAEVFDQASQSSRKY
TRHLTLNHFGVEALREKLLPQMEDMVRTTLSNWSSQESVEVKSASVTMAIDYAARQIYSGNLEN
APLKISDLFRDLVDGLMSFPINIPGTAHHRCLQTHKKVREMMKDIVKTRLEEPERQYGDMLDHM
IEDMKKESFLDEDFIVQLMFGLFFVTSDSISTTLALAFKLLAEHPLVLEELTAEHEAILKKREK
SESHLTWNDYKSMTETLQVINEVLRLGNIAPGFFRRALQDIPVNGYTIPSGWVIMIATAGLHLN
SNQFEDPLKFNPWRWKVCKVSSVIAKCFMPFGSGMKQCAGAEYSRVLLATFTHVLTTKYRWAIV
KGGKIVRSPIIRFPDGFHYKIIEKTN
Cucurbita pepo subsp. pepo
(SEQ ID NO: 171)
MWAIVVGLATLAVAYYIHWINKWKDSKFNGVLPPGTMGLPLVGETLQLARPSDSLDVHPFIKKK
VKRYGPIFKTCLAGRPVVVSTDAEFNNYIMLQEGRAVEMWYLDTLSKFFGLDTEWLKALGFIHK
YIRSITLNHFGAESLRERFLPRIEESAKETLRYWATQFSVEVKDSAAVMVFRTSMVKMvSEDSS
KLLTGGLTKKFTGLLGGFLTLPINVPGTTYNKCMKDMKEIQKKLREILEGRLASGGGSDEDFLG
QAIKDKGSQQFISDDFIIQLLFSISFASFESISTTLTLVLNYLADHPDVVKELEAEHEAIRNAR
ADPDGPITWEEYKSMTFTLHVIFETLRLGSVTPALLRKTTKELQINGYTIPEGWTVMLVTASRH
RDPAVYKDPHTFNPWRWKELDSITIQKNFMPFGGGLRHCAGAEYSKVYLCTFLHILFTKYRWTK
LKGGKVARAHILSFEDGLHVKFTPKE
Capsella rubella CYP705A38
(SEQ ID NO: 172)
MATLMTIDLQNCFIFTILSLLCYYLLFKKQKGSRAGCVLPPSPPSLPIIGHLHLLLSNLTHKSL
QNISTKFGSFLYLRVVNLPIVLVSSPSVAYEIYKTHDVNVSSRVATSLGDSLFLGSSGFITAPY
GDYWKFMKKMVATKLLRPQAIEQSRGGRAEELQMFYENLLDKAMKKESIEVSKEAMKLTNNIIC
RMSMGRSCSDENGEAERVRELLVKSTALTKKIFFANMFPRIPLFKKEIMGVSSEFDDLLERLLV
EHEERVEEHENKDMMDLLLEAYRDENAEYKISRKQIKSLFVEIFLGGTDTSAQTVQWILAELIN
KPNILERIREEIDSVVGKSRLMKETDLPNLPYLQATVKEGLRMHPPSPLLVRTFQESCEVKGFY
MPEKTMLVINVYALMRDPDTWEDPNEFKPERFLLSSRSRQEDEKEQGMMKYLPFGAGRRGCPGS
NLAYLFVGIAVGVMVQCFDWKIKEDKVNMEETTAGMNLAMAHPFKCTPVVRNDPLTLNLENPSS
Brassica rapa CYP705A37v2
(SEQ ID NO: 173)
MIVDFQNCSIEILLCEETELCYSVEEEFKKTNDLGPSPPSLPIIGHLHHELSGLPHKAFQKIST
KYGPLLHLHIFSFPIVLVSSPTMAHEIFTTHDLNISSRNTPAIDESLLFGPSGFTVAPYGDYVK
FIKKLLATKLLRPRAIEKSRGVRAEELKQFYLKVQDKALKKESIEIGKETMKFTNNMICRMSIG
RSFSEENGEVETLRELIIKSFALSKQILFVNVLRRPLEMLGLMSLFKKDIMDVSRGFDELLERV
LAEHEEKREEDQDMDMMDLLLEACRDENAEYKITRNQIKSLFVEIFLGGTDTSAHTTQWTMAEL
VNNPNILGRLRDEIDLVVGKERLIQETDLPNLPYLQAVVKEGLRLHPPAPLLVRMFDKKCVIKD
FFKVPEKTTLVVNVYGVMRDPDSWEDPNEFKPERFLTSKQEEDKVLKYLPFAAGRRGCPATNVG
YIFVGTSIGMMVQCFDWSIKEKVSMEEVYAGMSLSMAHPPTCTPVSRLSL
Siraitia qrosvenorii
(SEQ ID NO: 174)
MDFFSAFLLLLLTVLILLQIRTRRRNLPPSPPSLPIIGHLHLLKRPIHRNFHKIAAEYGPIFSL
RFGSRLAVIVSSLDIAEECFTKNDLIFANRPRLLISKHLGYNCTTMATSPYGDHWRNLRRLAAI
EIFSTARLNSSLSIRKDEIQRLLLKLHSGSSGEFTKVELKTMFSELAFNALMRIVAGKRYYGDE
VSDEEEAREFRGLMEEISLHGGASHWVDFMPLLKWIGGGGFEKSLVRLKRTDKEMQALIEERR
NKKVLERKNSLLDRLLELQASEPEYYTDQIIKGLVLVLLRAGTDTSAVTLNWAMAQLLNNPELL
AKAKAELDTKIGQDRPVDEPDLPNLSYLQAIVSETLRLHPAAPMLLSHYSSADCTVAGYDIPRG
IlLLVNAWALHRDPKLWDDPTSFRPERELGAANELQSKKLLAEGLGRRSCPGDTMALREVGLAL
GLLIQCYQWKKCGDEKVDMGEGGGITIHKAKPLEAMCKARPAMYKLLLNALDKI
Camelina sativa
(SEQ ID NO: 175)
MATMMIFDFQNCFIFIILCFVSLLCYTILFKKQESSRTGCVLPPSPPSLPIIGHLHLLLSSLTH
KSLHNISSKFGPFLYLRVVNLPIVLVSSASVAYEIYKTQDVNVSSRVATSLGDSLFLGSSGFIT
APYGDYWKFMKKMVATKLLRPQAIEQSRGGRAEELQGLYENLLDKRMKKESIEISKEAMKFTNN
IICRMSMGRSCSDENGEAEIVRELLVKSTALTKKIFFANMFPRIPLFKKEIMGVSNQFDELLER
LLVEHEERVEEHENKDMMDLLLEAFRDEHAEYKISRKQIKSLFVEIFLGGTDTSAQTVQWIMAE
LINKPSIIEKIREBIDSVVGKTRLIKETDLPKLPYLQVVVKEGLRMHPPSPLVVRTFQESCEVK
GFYMPEKTMLVINVYALMRDPESWEDPNEFKPERFLPSSKSRQDEEKEQGLKYLPFGAGRRGCP
GSNLAYLFVGLAVGVMVQCFDWKIKEDKVNMEETTAGMNLAMAHPFKCTPVVRIDPLTFNLKSP
SP
Raphanus sativus
(SEQ ID NO: 176)
MAPMTIDFQTCFIFILLSFFSFFCYFFFFKKTNDLGPSPPSLPIIGHLHHFLSVLPHKAFQQIS
TKYGPLLHLRIFSFPIVLVSSATMAYEIFTTHDLNISSRNAPAIDESLVFGSSGFIVSPYGDYV
KFIKKLLATKLLRPRAIEKSRGVRAEELKQFYLKLHDKALKKESIEIGNETMKFTNNMICGMSM
GRSCSEENGETETVRGLINKSFALSRKILFVNVLRRPLEKLGLLSLFKKDILDVSNRFDELLER
ILLEHEEKPEEEQDMDMMDLLLEASRDENAEYKITRNQIKALFVEIFMGGTDTSAHTTQWTMAE
LVNNPNSLEKLRDEIDMVVGKSRLIQETDLPNLPYLQAVVKEGLRLHPPAPLLVRMFEKKCVIK
DFFNVPEKTTLVVNLYGVMRDPDSWEDPNEFKPERFLTSKQEEEKTLKYLPFAAGRRGCPATNV
AYIFVGISIGMMVQCFDWSIKDKVSMEEVYAGMSLSMAHPPKFTPVSRLSL
Cucumis sativus (CsCYP87D20)
(SEQ ID NO: 194)
MAWTILLGLATLAIAYYIHWVNKWKDSKFNGVLPPGTMGLPLIGETIQLSRPSDSLDVHPFIQR
KVKRYGPIFKTCLAGRPVVVSTDAEFNHYIMLQEGRAVEMWYLDTLSKFFGLDTEWLKALGLIE
KYIRSITLNHFGAESLRERFLPRIEESARETLHYWSTQTSVEVKESAAAMVFRTSIVKMFSEDS
SKLLTEGLTKKFTGLLGGFLTLPLNLPGTTYHKCIKDMRQIQKKLKDILEERLAKGVKIDEDFL
GQAIKDKESQQFISEEFIIQLLFSISFASFESISTTLTLLLNFLADHPDVVKELEAEHEAIRKA
RADPDGPITWEEYKSMNFTLNVICETLRLGSVTPALLRKTTKEIQIKGYTIPEGWTVMLVTASR
HRDPEVYKDPDTFNPWRWKELDSITIQKNFMPFGGGLRHCAGAEYSKVYLCTFLHILFTKYRWR
KLKGGKIALIAHILRFEDGLYVNFTPKE
Cucumis sativus (sohB_CsCYP87D20)
(SEQ ID NO: 195)
MALLSEYGLFLAKIVTVVLAIAAIAAIIHWVNKWKDSKFNGVLPPGTMGLPLIGETIQLSRPSD
SLDVHPFIQRKVKRYGPIFKTCLAGRPVVVSTDAEFNHYIMLQEGRAVEMWYLDTLSKFFGLDT
EWLKALGLIHKYIRSITLNHFGAESLRERFLPRIEESARETLHYWSTQTSVEVKESAAAMVFRT
SIVKMFSEDSSKLLTEGLTKKFTGLLGGFLTLPLNLPGTTYHKCIKDMKQIQKKLKDILEERLA
KGVKIDEDFLGQAIKDKESQQFISEEFIIQLLFSISFASFESISTTLTLILNFLADHPDVVKEL
EAEHEAIRKARADPDGPITWEEYKSMNFTLNVICETLRLGSVTPALLRKTTKEIQIKGYTIPEG
NTVMLVTASRHRDPEVYKDPDTFNPWRWKELDSITIQKNFMPFGGGLRHCAGAEYSKVYLCTFL
HILFTKYRWRKLKGGKIARAHILRFEDGLYVNFTPKE
Cucumis sativus (zipA_CsCYP87D20)
(SEQ ID NO: 196)
MAQDLRLILIIVGAIAIIALLVHGFHWVNKWKDSKFNGVLPPGTMGLPLIGETIQLSRPSDSLD
VHPFIQRKVKRYGPIFKTCLAGRPVVVSTDAEFNHYIMLQEGRAVEMWYLDTLSKFFGLDTEWI
KALGLIHKYIRSITLNHFGAESLRERFLPRIEESARETLHYWSTQTSVEVKESAAAMVFRTSIV
KMFSEDSSKLLTEGLTKKFTGLLGGFLTLPLMLPGTTYHKCIKDMKQIQKKLKDILEERLAKGV
KIDEDFLGQAIKDKESQQFISEEFTIQLLFSISFASFESISTTLTLILNFLADHPDVVKELEAE
HEAIRKARADPDGPITWEEYKSMNFTLNVICETLRLGSVTPALLRKTTKEIQIKGYTIPEGWTV
MLVTASRHRDPEVYKDPDTENPWRWKELDSITIOKNFMPFGGGLRHCAGAEYSKVYLCTFLHIL
FTKYRWRKLKGGKIARAHILRFEDGLYVNETPKE
Cucumis sativus (CsCYP87D20_mut)
(SEQ ID NO: 197)
MAWTILLGLATLAIAYYIHWVNKWKDSKFNGVLPPGTMGLPLIGETIQFSRPSDSLDVHPFIQR
KVKRYGPIFKTCIAGRPVVVSTDAEFNHYIMLQEGRAVEMWYLDTFSKFLGLDTEWLKALGLIE
KYIRSITLNHFGAESLRERFLPRIEESARETLHYWSTQTSVEVKESAAAMVFRTSIVKMFSEDS
SKLLTEGLTKKFTGLLGGFLTLPLNLPGTTYHKCIKDMKQIQKKLKDILEERLAKGVKIDEDFL
GQAIKDKESQQFISBEFIIQLLFSISFASFASISTTLTLILNFLADHPDVVKELEAEHEAIRKA
RADPDGPITWEEYKSMNFTLNVICETLRLGSVTPALLRKTTKEIQIKGYTIPEGWTVMLVTASR
HRDPEVYKDPDTFNPWRWKELDSITIQKNFMPFGGGLRHCAGAEYSKVYLCTFLHILFTKYRWR
KLKGGKIARALILREEDGLYVNETPKE
Cucumis sativus (sohB_CsCYP87D20_mut)
(SEQ ID NO: 198)
MALLSEYGLFLAKIVTVVLAIAAIAAIIHWVNKWKDSKFNGVLPPCTMGLPLIGETIQFSRPSD
SLDVHPFIQRKVKRYGPIFKTCIAGRPVVVSTDAEFNHYIMLQEGRAVEMWYLDTFSKFLGLDT
EWLKALGLIHKYIRSITLNHFGAESLRERFLPRIEESARETLHYWSTQTSVEVKESAAAMVFRT
SIVKMFSEDSSKLLTEGLTKKFTGLLGGFLTLPLNLPGTTYHKCIKDMKQIQKKLKDILEERLA
KGVKIDEDFLGQAIKDKESQQFISEEFIIQLLFSISFASFASISTTLTLILNFLADHPDVVKEL
EAEHEAIRKARADPDGPITWEEYKSMNFTLNVICETLRLGSVTPALLRKTTKEIQIKGYTIPEG
WTVMLVTASRHRDPEVYKDPDTFNPWRWKELDSITIQKNFMPFGGGLRHCAGAEYSKVYLCTFL
HILFTKYRWRKLKGGKIARALILRFEDGLYVNFTPKE
Cucurbita pepo subsp. pepo (sohB_CppCYP)
(SEQ ID NO: 199)
MALLSEYGLFLAKIVTVVLAIAAIAAIIHWINKWKDSKFNGVLPPGTMGLPLVGETLQLARPSD
SLDVHPFIKKKVKRYGPIFKTCLAGRPVVVSTDAEFNNYIMLQEGRAVEMWYLDTLSKFFGLDT
EWLKALGFIHKYIRSITLNHFGAESLRERFLPRIEESAKETLRYWATQPSVEVKDSAAVMVFRT
SMVKMVSEDSSKLLTGGLTKKFTGLLGGFLTLPINVPGTTYNKCMKDMKEIQKKLREILEGRLA
SGGGSDEDFLGQAIKDKGSQQFISDDFIIQLLFSISFASFESISTTLTLVLNYLADHPDVVKEL
EAEHEAIRNARADPDGPITWEEYKSMTFTLHVIFETLRLGSVTPALLRKTTKEIQINGYTIPEG
WTVMLVTASRHRDPAVYKDPHTENPWRWKELDSITIQKNEMPFGGGLRHCAGAEYSKVILCTEL
HILFTKYRWTKLKGGKVARAHILSFEDGLHVKFTPKE
Cucurbita pepo subsp. pepo (17alpha_CppCYP)
(SEQ ID NO: 200)
MALLLAVFHWINKWKDSKFNGVLPPGTMGLPLVGETLQLARPSDSLDVHPFIKKKVKRYGPIFK
TCLAGRPVVVSTDAEFNNYIMLQEGRAVEMWYLDTLSKFFGLDTEWLKALGFIHKYIRSITLNE
FGAESLRERFLPRIEESAKETLRYWATQPSVEVKDSAAVMVFRTSMVKMVSEDSSKLLTGGLTK
KPTGLLGGFLTLPINVPGTTYNKCMKDMKEIQKKLRBILEGRLASGGGSDEDELGQAIKDKGSQ
QFISDDFIIQLLFSISFASFESISTTLTLVLNYLADHPDVVKELEAEHEAIRNARADPDGPITW
EEYKSMTFTLHVIFETLRLGSVTPALLRKTTKELQINGYTIPEGWTVMLVTASRHRDPAVYKDP
HTFNPWRWKELDSITIQKNFMPFGGGLRHCAGAEYSKVYLCTFLHILFTKYRWTKLKGGKVARA
HILSFEDGLHVKPTPKE
Siraitia grosvenorii (CYP1798)
(SEQ ID NO: 221)
MEMSSSVAATISIWMVVVCIVGVGWRVVNWVWLRPKKLEKRLREQGLAGNSYRLLFGDLKERAA
MEEQANSKPINFSHDIGPRVFPSMYKTIQNYGKNSYMWLGPYPRVHIMDPQQLKTVFTLVYDIQ
KPNLNPLIKFLLDGIVTHEGEKWAKHRKIINPAFHLEKLKDMIPAFFHSCNEIVNEWERLISKE
GSCELDVMPYLQNLAADAISRTAFGSSYEEGKMIFQLLKELTDLVVKVAFGVYIPGWRFLPTKS
NNKMKEINRKIKSLLLGIINKRQKAMEEGEAGQSDLLGILMESNSNEIQGEGNNKEDGMSIEDV
IEECKVFYIGGQETTARLLIWTMILLSSHTEWQERARTEVLKVFGNKKPDFDGLSRLKVVTMIL
NEVLRLYPPASMLTRIIQKETRVGKLTLPAGVILIMPIILIHRDHDLWGEDANEFKPERFSKGV
SKAAKVQPAFFPFGWGPRICMGQNFAMIEAKMALSLILQRFSFELSSSYVHAPTVVFTTQPQHG
AHIVLRKL
Cytochrome P450 Reductase
Stevia rebaudiana (SrCPR1)
(SEQ ID NO: 92)
MAQSDSVKVSPFDLVSAAMNGKAMEKLNASESEDPTTLPALKMLVENRELLTLFTTSFAVLIGC
LVFLMWRRSSSKKLVQDPVPQVIVVKKKEKESEVDDGKKKVSIFYGTQTGTAEGFAKALVEEAK
VRYEKTSFKVIDLDDYAADDDEYEEKLKKESLAFFFLATYGDGEPTDNAANFYKWFTEGDDKGE
NLKKLQYGVFGLGNRQYEHFNKIAIVVDDKLTEMGAKRLVPVGLGDDDQCIEDDFTAWKELVWP
ELDQLLRDEDDTSVTTPYTAAVLEYRVVYHDKPADSYABDQTHTNGHVVHDAQHPSRSNVAFKK
ELHTSQSDRSCTHLEFDISHTGLSYETGDHVGVYSENLSEVVDEALKLLGLSPDTYFSVHADKE
DGTPIGGASLPPPFPPCTLRDALTRYADVLSSPKKVALLALAAHASDPSEADRLKFLASPAGKD
EYAQWIVANQRSLLEVMQSFPSAKPPLGVFFAAVAPRLQPRYYSISSSPKMSPNRIHVTCALVY
ETTPAGRIHRGLCSTWMKNAVPLTESPDCSQASIFVRTSNFRLPVDPKVPVIMIGPGTGLAPFR
GFLQERLALKESGTELGSSIFFFGCRNRKVDFTYEDELNNFVETGALSELIVAFSREGTAKEYV
QHKMSQKASDIWKLLSEGAYLYVCGDAKGMAKDVHRTLHTIVQEQGSLDSSKAELYVKNLQMSG
RYLRDVW
Arabidopsis thaliana CPR1 (AtCPR1)
(SEQ ID NO: 93)
MATSALYASDLFKQLKSIMGTDSLSDDVVLVIATTSLALVAGFVVLLWKKTTADRSGELKPLMI
PKSLMAKDEDDDLDLGSGKTRVSIFFGTQTGTAEGFAKALSEEIKARYEKAAVKVIDLDDYAAD
DDQYEEKLKKETLAFFCVATYGDGEPTDNAARFYKWFTEENERDIKLQQLAYGVFALGNRQYEH
FNKIGIVLDEELCKKGAKRLIEVGLGDDDQSIEDDFNAWKESLWSELDKLLKDEDDKSVATPYT
AVIPEYRVVTHDPRFTTQKSMESNVANGNTTIDIHHPCRVDVAVQKELHTHESDRSCIHLEFDI
SRTGITYETGDHVGVYAENHVEIVEEAGKLLGHSLDLVFSIHADKEDGSPLESAVPPPFPGPCT
LGTGLARYADLLNPPRKSALVALAAYATEPSEAEKLKHLTSPDGKDEYSQWIVASQRSLLEVMA
AFPSAKPPLGVFFAAIAPRLQPRYYSISSSPRLAPSRVHVTSALVYGPTPTGRIHKGVCSTWMK
NAVPAEKSHECSGAPIFIRASNFKLPSNPSTPIVMVGPGTGLAPFRGFLQERMALKEDGEELGS
SLLEEGCRNRQMDELYEDELNNFVDQGVLSELIMAFSREGAQKEYVQHKMMEKAAQVWDLLKEE
GYLYVCGDAKGMARDVHRTLHTIVQEQEGVSSSEAEAIVKKLQTEGRYLRDVW
Arabidopsis thaliana CPR2 (AtCPR2)
(SEQ ID NO: 94)
MASSSSSSSTSMIDLMAAIIKGEPVIVSDPANASAYESVAAELSSMLIENRQFAMIVTTSIAVL
IGCIVMLVWRRSGSGNSKRVEPLKPLVIKPREEEIDDGRKKVTIFFGTQTGTAEGFAKALGEEA
KARYEKTRFKIVDLDDYAADDDEYEEKLKKEDVAFFFLATYGDGEPTDNAARFYKWFTEGNDRG
EWLKNLKYGVFGLGNRQYEHFNKVAKVVDDILVEQGAQRLVQVGLGDDDQCIEDDFTAWREALW
PELDTILREEGDTAVATPYTAAVLEYRVSIHDSEDAKFNDINMANGNGYTVFDAQHPYKANVAV
KRELHTPESDRSCIHLEFDIAGSGLTYETGDHVGVLCDNLSETVDEALRLLDMSPDTYFSLHAE
KEDGTPISSSLPPPFPPCNLRTALTRYACLLSSPKKSALVALAAHASDPTEAERLKHLASPAGK
DEYSKWVVESQRSLLEVMAEFPSAKPPLGVFFAGVAPRLQPRFYSISSSPKIAETRIHVTCALV
YEKMPTGRIHKGVCSTWMKNAVPYEKSENCSSAPIEVRQSNFKLPSDSKVPIIMIGPGTGLAPF
RGFLQERLALVESGVELGPSVLFFGCRNRRMDFIYEEELQRFVESGALAELSVAFSREGPTKEY
VQHKMMDKASDLWNMLSQGAYLYVCGDAKGMARDVHKSLHlLAMEQGSMDSTKAEGEVKNLMTS
GRYLRDVW
Arabidopsis thaliana (AtCPR3)
(SEQ ID NO: 95)
MASSSSSSSTSMIDLMAAIIKGEPVIVSDPANASAYESVAAELSSMLIENRQFAMIVTTSIAVL
IGCIVMLVWRRSGSGNSKRVEPLKPLVIKPREEEIDDGRKKVTIFFGTQTGTAEGFAKALGEEA
KARYEKTRFKIVDLDDYAADDDEYEEKLKKEDVAFFFLATYGDGEPTDNAARFYKWFTEGNDRG
EWLKNLKYGVFGLGNRQYEHFNKVAKVVDDILVEQGAQRLVQVGLGDDDQCIEDDFTAWREALW
PELDTILREEGDTAVATPYTAAVLEYRVSIHDSEDAKFNDITLANGNGYTVFDAQHPYKANVAV
KRELHTPESDRSCIHLEFDIAGSGLTMKLGDHVGVLCDNLSETVDEALRLLDMSPDTYFSLHAE
KEDGTPISSSLPPPFPPCNLRTALTRYACLLSSPKKSALVALAAHASDPTEAERLKHLASPAGK
DEYSKWVVESQRSLLEVMAEFPSAKPPLGVFEAGVAPRLQPRPYSISSSPKIAETRIHVTCALV
YEKMPTGRIHKGVCSTWMKNAVPYEKSEKLFLGRPIFVRQSNFKLPSDSKVPIIMIGPGTGLAP
FRGFLQERLALVESGVELGPSVIFFGCRNRRMDFIYEEELQRFVESGALAELSVAFSREGPTKE
YVQHKMMDKASDIWNMISQGAYLYVCGDAKGMARDVHRSLHTIAQEQGSMDSTKAEGFVKNLQT
SGRYLRDVW
Stevia rebaudiana CPR2 (SrCPR2)
(SEQ ID NO: 96)
MAQSESVEASTIDLMTAVLKDTVIDTANASDNGDSKMPPALAMMFEIRDLLLILTTSVAVLVGC
FVVLVWKRSSGKKSGKELEPPKIVVPKRRLEQEVDDGKKKVTIFFGTQTGTAEGFAKALFEEAK
ARYEKAAFKVIDLDDYAADLDEYAEKLKKETYAFFFLATYGDGEPTDNAAKFYKWFTEGDEKGV
WLQKLQYGVFGLGNRQYEHFNKIGIVVDDGLTEQGAKRIVPVGLGDDDQSIEDDFSAWKELVWP
ELDLLLRDEDDKAAATPYTAAIPEYRVVFHDKPDAFSDDHTQTNGHAVHDAQHPCRSNVAVKKE
LHTPESDRSCTHLEFDISHTGLSYETGDHVGVYCENLIEVVEEAGKLLGLSTDTYFSLHIDNED
GSPLGGPSLQPPFPPCTLRKALTNYADLLSSPKKSTLLALAAHASDPTEADRLRFLASREGKDE
YAEWVVANQRSLLEVMEAFPSARPPLGVFFAAVAPRLQPRYYSISSSPKMEFNRIHVTCALVYE
KTPAGRIHKGICSTWMKNAVPLTESQDCSWAPIFVRTSNFRLPIDPKVPVIMIGPGTGLAPFRG
FLQERLALKESGTELGSSILFFGCRNRKVDYIYENELNNFVENGALSELDVAFSRDGPTKEYVQ
HKMTQKASEIWNMLSEGAYLYVCGDAKGMAKDVHRTLHTIVQEQGSLDSSKAELYVKNLQMSGR
YLRDVW
Stevia rebaudiana CPR3 (SrCPR3)
(SEQ ID NO: 97)
MAQSNSVKISPLDLVTALFSGKVLDTSNASESGESAMLPTIAMIMENRELLMILTTSVAVLIGC
VVVLVWRRSSTKKSALEPPVIVVPKRVQEEEVDDGKKKVTVFFGTQTGTAEGFAKALVEEAKAR
YEKAVFKVIDLDDYAADDDEYEEKLKKESLAFFFLATYGDGEPTDNAARFYKWFTEGDAKGEWL
NKLQYGVFGLGNRQYEHFNKIAKVVDDGLVEQGAKRLVPVGLGDDDQCIEDDFTAWKELVWPEL
DQLLRDEDDTTVATPYTAAVAEYRVVEHEKPDALSEDYSYTNGHAVHDAQHPCRSNVAVKKELH
SPESDRSCTHLEFDISNTGLSYETGDHVGVYCENLSEVVNDAERLVGLPPDTYFSIHTDSEDGS
PLGGASLPPPFPPCTLRKALTCYADVLSSPKKSALLALAAHATDPSEADRLKFLASPAGKDEYS
QWIVASQRSLLEVMEAFPSAKPSLGVFFASVAPRLQPRYYSISSSPKMAPDRIHVTCALVYEKT
PAGRIHKGVCSTWMKNAVPMTESQDCSWAPIYVRTSNFRLPSDPKVPVIMIGPGTGLAPFRGFL
QERLALKEAGTDLGLSILFFGCRNRKVDFIYENELNNFVETGALSELIVAFSREGPTKEYVQHK
MSEKASDIWNLLSEGAYLYVCGDAKGMAKDVHRTLHTIVQEQGSLDSSKAELYVKNLQMSGRYL
RDVW
Artemisia annua CPR (AaCPR)
(SEQ ID NO: 98)
MAQSTTSVKLSPFDLMTALLNGKVSFDTSNTSDTNIPLAVFMENRELLMILTTSVAVLIGCVVV
LVWRRSSSAAKKAAESPVIVVPKKVTEDEVDDGRKKVTVFFGTQTGTAEGFAKALVEEAKRRYE
LVWRRSSSAAKKAAESPVIVVPKKVTEDEVDDGRKKVTVFFGTQTGTAEGFAKALVEEAKARYE
KAVFKVIDLDDYAAEDDEYEEKLKKESLAFFFLATYGDGEPTDNAARFYKWFTEGEEKGEWLDK
LQYAVFGLGNRQYEHFNKIAKVVDEKLVEQGAKRLVPVGMGDDDQCIEDDETANKELVWPELDQ
LLRDEDDTSVATPYTAAVAEYRVVFHDKPETYDQDQLTNGHAVHDAQHPCRSNVAVKKELHSPL
SDRSCTHLEFDISNTGLSYETGDHVGVYVENLSEVVDEAEKLIGLPPHTYFSVHADNEDGTPLG
GASLPPPFPPCTLRKALASYADVLSSPKKSALLALAAHATDSTEADRLKFLASPAGKDEYAQWI
VASHRSLLEVMEAFPSAKPPLGVFFASVAPRLQPRYYSISSSPRFAPNRIHVTCALVYEQTPSG
RVHKGVCSTWMKNAVPMTESQDCSWAPIYVRTSNFRLPSDPKVPVIMIGPGTGLAPFRGFLQER
LAQKEAGTELGTAILFFGCPURKVDFIYEDELNNFVETGALSELVTAFSREGATKEYVQHKMTQ
KASDIWNLLSEGAYLYVCGDAKGMAKDVHRTLHTIVQEQGSLDSSKAELYVKNLQMAGRYLRDV
A
CPR (PgCPR)
(SEQ ID NO: 99)
MAQSSSGSMSPFDFMTAIIKGKMEPSNASLGAAGEVTAMILDNRELVMILTTSIAVLIGCVVVF
IWRRSSSQTPTAVQPLKPLLAKBTESEVDDGKQKVTIFFGTQTGTAEGFAKALADEAKARYDKV
TFKVVDLDDYAADDEEYEEKLKKETLAFFFLATYGDGEPTDNAARFYKWFLEGKERGEWLQNLK
FGVFGLGNRQYEHFNKIAIVVDEILAEQGGKRLISVGLGDDDQCIEDDFTAWRESLWPELDQLL
RDEDDTTVSTPYTAAVLEYRVVFHDPADAPTLEKSYSNANGHSVVDAQHPLRANVAVRRELHTP
ASDRSCTHLEFDISGTGIAYETGDHVGVYCENLAETVEEALELLGLSPDTYFSVHADKEDGTPL
SGSSLPPPFPPCTLRTALTLHADLLSSPKKSALLALAAHASDPTEADRLRHLASPAGKDEYAQW
IVASQRSLLEVMAEFPSAKPPLGVFFASVAPRLQPRYYSISSSPRIAPSRIHVTCALVYEKTPT
GRVHKGVCSTWMKNSVPSEKSDECSWAPIFVRQSNFKLPADAKVPIIMIGPGTGLAPFRGFLQE
RLALKEAGTELGPSILFFGCRNSKMDYIYEDELDNFVQNGALSELVLAFSREGPTKEYVQHKMM
EKASDIWNLISQGAYLYVCGDAKGMARDVHRTLHTIAQEQGSLDSSKAESMVKNLQMSGRYLRD
VW
Camptotheca acuminate CaCPR
(SEQ ID NO: 201)
MAQSSSVKVSTFDLMSAILRGRSMDQTNVSFESGESPALAMLIENRELVMILTTSVAVLIGCFV
VLLWRRSSGKSGKVTEPPKPLMVKTEPEPEVDDGKKKVSIFYGTQTGTAEGFAKALAEEAKVRY
EKASFKVIDLDDYAADDEEYEEKLKKETLTFFFLATYGDGEPTDNAARFYKWFMEGKERGDWLK
NLHYGVFGLGNRQYEHFNRIAKVVDDTIAEQGGKRLIPVGLGDDDQCIEDDFAAWRELLWPELD
QLLQDEDGTTVATPYTAAVLEYRVVFHDSPDASLLDKSFSKSNGHAVHDAQHPCRANVAVRREL
HTPASDRSCTHLEFDISGTGLVYETGDHVGVYCENLIEVVEEAEMLLGLSPDTFFSIHTDKEDG
TPLSGSSLPPPFPPCTLRRALTQYADLLSSPKKSSLLALAAHCSDPSEADRLRHLASPSGKDEY
AQWVVASQRSLLEVMAEFPSAKPPIGAFFAGVAPRLQPRYYSISSSPRMAPSRIHVTCALVFEK
TPVGRIHKGVCSTWMKNAVPLDESRDCSWAPIFVRQSNFKLPADTKVPVLMIGPGTGLAPFRGF
LQERLALKEAGAELGPAILFFGCRNRQMDYIYEDELNNFVETGALSELIVAFSREGPKKEYVQH
KMMEKASDIWNMISQEGYIYVCGDAKGMARDVHRTLHTIVQEQGSLDSSKTESMVKNLQMNGRY
LRDVW
Non-heme iron oxidase
Acetobacter pasteurianus subsp. ascendens (ApGA2ox)
(SEQ ID NO: 100)
MSVSKTTETFTSIPVIDISKLYSSDLAERKAVAEKLGDAARNIGFLYISGHNVSADLIEGVRKA
ARDFFAEPFEKKMEIYIGTSATHKGFVPEGEEVYSAGRPDHKEAFDIGYEVPANHPLVQAGTPL
LGPNNWPDIPGFRSAAEAYYRTVFDLGRTLFRGFALALGLNESYFOTVANFPPSKLRMIHYPYD
ADAODAPGIGAHTDYECFTILLADKPGLEVMNGNGDWIDAPPIPGAFVVNIGDMLEVMTAGEFV
ATAHRVRKVSEERYSFPLFYACDYHTQIRPLPAFAKKIDASYETITIGEHMWAQALQTYQYLVK
KVEKGELKLPKGARKTATFGHFKRNSAA
Cucurbita maxima (CmGA2ox)
(SEQ ID NO: 101)
MAAASSFSAAFYSGIPLIDLSAPDAKQLIVKACEELGFFKVVKHGVPMELISSLESESTKFFSL
PLSEKQRAGPPSPFGYGNKQIGRNGDVGWVEYLLLNTHLESNSDGFLSMFGQDPQKLRSAVNDY
ISAvRNMAGEILELMAEGLKIQQRNVFSKLVMDEQSDSVFRVNHYPPCPDLQALKGTNMIGFGE
HTDPQIISVLRSNNTSGFQISLADGNWISVPPDHSSFFINVGDSLQVMTNGRFKSVKHRVLTNS
SKSRVSMIYFGGPPLSEKIAPLASLMQGEERSLYKEFTWFEYKRSAYNSRLADNRLVPFERIAA
S
Dendrobium catenatum (DcGA3ox)
(SEQ ID NO: 102)
MPSLSKEHFDLYSAFHVPETHAWSSSHLHDHPIAGDGATIPVIDISDPDAASMVGGACRSWGVF
YATSHGIPADLLHQVESHARRLFSLPLHRKLQTAPRDGSLSGYGRPPISAFFPKLMWSEGFTLA
GHDDHLAVTSQLSPFDSLSFCEVMEAYRKEMKKLAGRLFRLLILSLGLEEEEMGQVGPLKELSQ
AADAIQLNSYPTCPEPERAIGMAAHTDSAFLTVLHQTDGAGGLQVLRDQDESGSARWVDVLPRP
DCLVVNVGDLLHILSNGRFKSVRHRAVVNRADHRISAAYFIGPPAHMKVGSITKLVDMRTGPMY
RPVTWPEYLGIRTRLFDKALDSVKFQEKELEKD
Cucurbita maxima (CmGA3ox)
(SEQ ID NO: 103)
MATTIADVFKSFPVHIPAHKNLDFDSLHELPDSYAWIQPDSFPSPTHKHHNSILDSDSDSVPLI
DLSLPNAAALIGNAFRSWGAFQVINHGVPISLLQSIESSADTLFSLPPSHKLKAARTPDGISGY
GLVRISSFFPKRMWSEGFTIVGSPLDHFRQLWPHDYHKHCEIVEEYDREMRSLCGRLMWLGLGE
LGITRDDMKWAGPDGDFKTSPAATQFNSYPVCPDPDRAMGLGPHTDTSLLTTVYQSNTRGLQVL
REGKRWVTVEPVAGGLWQVGDLLHILTNGLYPSALHQAWNRTRKRLSVAYVFGPPESAEISP
LKKLLGPTQPPLYRPVTWTEYLGKKAEHFNNALSTVRLCAPITGLLDVNDHSRVKVG
Cucurbita maxima (CmGA20ox)
(SEQ ID NO: 104)
MHVVTSTPEARHDGAPLVFDASVLRHQHNIPKQFIWPDEEKPAATCPELEVPLIDLSGFLSGEK
DAAAEAVRLVGEACEKHGFFLVVNHGVDRKLIGEAHKYMDEFFELPLSQKQSAQRKAGEHCGYA
SSFTGRFSSKLPWKETLSFRFAADESLNNLVLHYLNDKLGDQFAKFGRVYQDYCEAMSGLSLGI
MELLGKSLGVEEQCFKNFFKDNDSIMRLNFYPPCQKPHLTLGTGPHCDPTSLTILHQDQVGGLQ
VFVDNQWRLITPNFDAFVVNlGDTFMALSNGRYKSCLHRAVVNSERTRKSLAFFLCPRNDKVVR
PPRELVDTONPRRYPDFTWSMLLRFTQTHYRADMKTLEAFSAWLQQEQQEQQEQQFNI
Agapanthus praecox subsp. orientalis (ApoGA20ox)
(SEQ ID NO: 105)
MVLQPFVFDAALLRDEHNIPTQFIWPEEDKPSPDASEELILPFIDLKAFLSGDPDSPFQVSKQV
GEACESLGAFQVTNHGIDFDLLEEAHSCIQKFFSMPLCERQRALRKAGESYGYASSFTGRFCSK
LPWKETLSFRYSSSSSDIVQNYFVRTLGEEFRHFGEVYQKYCESMSKLSLMIMEVLGLSLGVGR
MHFREFFEGNDSTMRLNYYPPCKKPDLTLGTGPHCDPTSLTILHQDDVSGLQVFTGGKWLTVRP
KTDAFVVNIGDTFTALSNGRYKSCLHRAVVNSKTARKSLAFFLCPAMNKIVRPPRELVDIDHPR
AYPDFTWSALLEFTQKHYRADMQTLNEFSKYILQAQGTLHK
Arabidopsis thaliana (AtFH)
(SEQ ID NO: 106)
MAPGTLTELAGESKLNSKFVRDEDERPKVAYNVFSDEIPVISLAGIDDVDGKRGEICRQIVEAC
ENWGIFQVVDHGVDTNLVADMTRLARDFFALPPEDKLRFDMSGGKKGGFIVSSHLQGEAVQDWR
BIVTYFSYPVRNRDYSRWPDKPEGWVKVTEEYSERLMSLACKLLEVLSEAMGLBKESLTNACVD
MDQKIVVNYYPKCPQPDLTLGLKRHTDPGTTTLLLQDQVGGLQATRDNGKTWITVQPVEGAFVV
NLGDHGHFLSNGRFKNADHQAVVNSNSSRLSIATFQNPAPDATVYPLKVREGEKAILEEPITFA
EMYKRKMGRDLELARLKKLAKEERDHKEVDKPVDQIEA
Chrysosplenium americanum (CaF6H)
(SEQ ID NO: 107)
QEKTLNSRFVARDEDSLERPKVSAIYNGSFDEIPVLISLAGIDMTGAGTDAAARRSEICRKIVE
ACEDWGIFGEIDDDHGKRAEICDKIVKACEDWGVFQPDEKLESVMSAAKKGDFVVDHGVDAEVI
SQWTTFAKPTSHTQFETETTRDFPNKPEGWKATTEQYSRTLMGLACKLLGVISEAMGLEKEALT
KACVDMDQKVVVNYYPKCPQPDLTLGLKRHTDPGTITLLLQDQVGGLQATRDGGKTWITVQPVK
DNGWILLHIGDSNGHRHGHFLSNGRFKSHQAYRYRRPTRGSPTFGTKVSNYPPCPEQSLVRPPA
GRPYGRALNALDAKKLASAKQQLESAAILLISELAVAYIILAILPSSEIIAEEGYL
Datura stramonium (DsH6H)
(SEQ ID NO: 108)
MATFVSNWSTNNVSESFIAPLEKRAEKDVALGNDVPIIDLQQDHLLIVQQITKACQDFGLFQVI
NHGVPEKLMVEAMEVYKEFFALPAEEKEKFQPKGEPAKFELPLEQKAKLYVEGERRCNEEFLYW
KDTLAHGCYPLHEELLNSWPEKPPTYRDVIAKYSVEVRKLTMRILDYICEGLGLKLGYFDNELT
QIQMLLANYYPSCPDPSSTIGSGGHYDGNLITLLQQDLVGLQQLIVKDDRWIAVEPIPTAFVVN
LGLTLKVMSNEKFEGSIHRVVTHPTRNRISIGTLIGPDYSCTIEPIKELLSQENPPLYKPYPYA
KFAEIYLSDKSDYDAGVKPYKINQFPN
Arabidopsis thaliana (AtH6DH)
(SEQ ID NO: 109)
MENHTTMKVSSLNCIDLANDDLNHSVVSLKQACLDCGFFYVINHGISEEFMDDVFEQSKKLEAL
PLEEKMKVLRNEKHRGYTPVLDELLDPKNQINGDHKEGYYIGIEVPKDDPHWDKPFYGPNPWPD
ADVLPGWRETMEKYHQEALRVSMAIARLLALALDLDVGYFDRTEMLGKPIATMRLLRYQGISDP
SKGIYACGAHSDFGMMTLLATDGVMGLQICKDKNAMPQKWEYVPPTKGAFTVNLGDMLERWSNG
FFKSTLHRVLGNGQERYSIPFFVEPNHDCLVECLPTCKSESELPKYPPIKCSTYLTQRYEETHA
NLSIYHQQT
Solanuni lycopersicum (S1F35H)
(SEQ ID NO: 110)
MALRINELFVAAIIYIIVHIIISKLITTVRERGRRLPLPPGPTGWPVIGALPLLGSMPHVALAK
MAKKYGPIMYLKVGTCGMVVASTPNAAKAFLKTLDINFSNRPPNAGATHLAYNAQDMVFAPYGP
RWKLLRKLSNLHMLGGKALENWANVRANELGHMLKSMFDASQDGECVVIADVLTFAMANMIGQV
MLSKRVFVEKGVEVNEFKNMVVELMTVAGYFNIGDFIPKLAWMDIQGIEKGMKNLHKKFDDLLT
KMFDEHFATSNERKFNPDFLDVVMANRDNSEGERLSTTNIKALLLNLFTAGTDTSSSVIEWALA
EMMKNPKIFEKAQQEMDQVIGKNRRLIESDIPNLPYLRAICKETFRKHPSTPLNLPRVSSEPCT
VDGYYIPKNTRLSVNIWAIGRDPDVWENPLEFTPERFLSGKNAKIEPRGNDFELIPFGAGRRIC
AGTRMGIVMVEYILGTLVHSFDWKLPNNVIDINMEESFGLALQKAVPLEAMVTPRLSLDVYRC
D4H
(SEQ ID NO: 111)
MPKSWPIVISSHSFCFLPNSEQERKMKDLNFHAATLSEEESLRELKAFDETKAGVKGIVDTGIT
KIPRIFIDQPKNLDRISVCRGKSDIKIPVINLNGLSSNSEIRREIVEKIGEASEKYGFFQIVNH
GIPQDVMDEMVDGVRKFHEQDDQIKRQYYSRDRFNKNFLYSSNYVLIFGIACNWRDTMECIMNS
NQFDPQEFPDVCRDILMKYSNYVRNLGLILFELLSEMiGLKPNHLSEMDCAEGLILLGHYYPAC
PQPELTFGTSKKSDSGFLTILKQDQIGGLQILLENQWIDVPFIPGALVINIADLLQLITNDKFK
SVEHRVLANKVGPRISVAVAFGIKTQTQEGVSPRLYGPIKELISSENPPIYKSVTVKDFITIRF
AKRFDDSSSLSPFRLNN
Catharanthus roseus (crD4Hlike)
(SEQ LD NO: 112)
MKELNNSEEELKAFDDTKAGVKALVDSGITEIPRIFLDHPTNLDQISSKDREPKFKKNIPVIDL
DGISTNSEIRREIVEKIREASEKWGFHQIVNHGIPQEVMDDMIVGIRRFHEQDNEIKKQFYTRD
RTKSFRYTSNFVLKPKIACNWRDTFECTMAPHQPNPQDLPDICRDIMMKYISYTRNLGLTLFEL
LSEALGLKSNRLKDMHCDEGVELVGHYYPACPQPELTLGTSKHTDTGFLTMLQQDQIGGLQVLY
ENHQWVDVPFIPGALIINIGDFLQIISNDKFKSAPHRVLANKNGPRISTASVFMPNFLESAEVR
LYGPIKELLSEENPPIYEQITAKDYVTVQFSRGLDGDSFLSPFMLNKDNMEK
Zea mays (ZmBX6)
(SEQ ID NO: 113)
MAPTTATKDDSGYGDERRRELQAFDDTKLGVKGLVDSGVKSIPSIFHHPPEALSDIISPAPLPS
SPPSGAAIPVVDLSVTRREDLVEQVRHAAGTVGFFWLVNHGVAEELMGGMLRGVRGFNEGPVEA
KQALYSRDLARNLRFASNFDLFKAAAADWRDTLFCEVAPNPPPREELPEPLRNVMLEYGAAVTK
LARFVFELLSESLGMPSDHLYEMECMQNLNVVCQYYPPCPEPHRTVGVKRHTDPGFFTILLQDG
MGGLQVRLGNNGQSGGCWVDIAPRPGALMVNIGDLLQLVTNDRFRSVEHRVFANKSSDTARVSV
ASFFNTDVRRSERMYGPIPDPSKPPLYRSVRARDFIAKFNTIGLDGRALDHFRL
Hordeum vulgare subsp. vulgare (HVIDS2)
(SEQ ID NO: 114)
MAKVMNLTPVHASSIPDSFLLPADRLHPATTDVSLPIIDMSRGRDEVRQAILDSGKEYGFIQVV
NHGISEPMLHEMYAVCHEFFDMPAEDKAEFFSEDRSERNKLFCGSAFETLGEKYWIDVLELLYP
LPSGDTKDWPHKPOMLREVVGNYTSLARGVAMEILRLLCEGLGLRPDFFVGDISGGRVVVDINY
YPPSPNPSRTLGLPPHCDRDLMTVLLPGAVPGLEIAYKGGWIKVQPVPNSLVINFGLOLEVVTN
GYLKAVEHRAATNFAEPRLSVASFIVPADDCVVGPAEEFVSEDNPPRYRTLTVGEFKRKHNVVN
LDSSINQIININNNQKGI
Hordeum vulgare subsp. vulgare (HvIDS3)
(SEQ ID NO: 115)
MENILHATPAPVSLPESFVFASDKVPPATKAVVSLPIIDLSCGRDEVRRSILEAGKELGFEQVV
NKGVSKQVMRDMEGMCEQFFHLPAADKASLYSEERHKPNRLFSGATYDTGGEKYWRDCLRLACP
FPVDDSINEWPDTPKGLRDVIEKFTSQTRDVGKELLRLLCEOMGIRADYFEGDLSGGNVILNIN
HYPSCPNPDKALGQPPHCDRNLITLLLPGAVNGLEVSYKGDWIKVDPAPNAFVVNFGQQLEVVT
NGLLKSIEHRaMTNSALARTSVATFIMPTQECLIGPAKEFLSKENPPCYRTTMFRDFMRIYNVV
KLGSSLNLTTNLKNVQKEI
Uridine diphosphate dependent glycosyltransferase (UGT)
Siraitia grosvenorii UGT720-269-1
(SEQ ID NO: 116)
MEDRNAMDMSRIKYEPQPLRPASMVQPRVLLFPFPALGHVKPFLSLAELLSDAGIDVVFLSTEY
NHRRISNTEALASRFPTLHFETIPDGLPPNESRALADGPLYFSMREGTKPRFRQLIQSLNDGRW
PITCLITDIMLSSPIEVAEEFGIPVIAFCPCSARYLSIHFEIPKLVEEGQIPYADDDPIGELQG
VPLFEGLLRRNHLPGSWSDKSADISFSHGLINQTLAAGRASALILNTFDELEAPFLTHLSSIFN
KIYTIGPLHALSKSRLGDSSSSASALSGFWKEDRACMSWLDCQPPRSVVFVSFGSTMKMKADEL
REFWYGLVSSGKPFLCVLRSDVVSGGEAAELIEQMAEEEGAGGKLGMVVEWAAQEKVLSHPAVG
GFLTHCGWNSTVESIAAGVPMMCWPILGDQPSNATWIDRVWKIGVERNNREWDRLTVEKMVRAL
MEGQKRVEIQRSMEKLSKLANEKVVRGINLHPTISLKKDTPTTSEHPRHEFENMRCMNYEMLVG
NAIKSPTLTKK
Siraitia grosvenorii UGT94-289-3
(SEQ ID NO: 117)
MTIFFSVEILVLGLAEFAAIAMDAAQQGDTTTILMLPWLGYGHLSAFLELAKSLSRRNFHIYFC
STSVNLDAIKPKLPSSFSDSIQFVELHLPSSPEFPPHLHTTNGLPPTLMPALHQAFSMAAQHFE
SILQTLAPHLLIYDSLQPWAPRVASSLKIPAINFNTTGVFVISQGLHPIHYPHSKFPFSEFVLH
NHWKAMYSTADGASTERTRKRGEAFLYCLHASCSVILINSFRELEGKYMDYLSVLLNKKVVPVG
PLVYEPNQDGEDEGYSSIKNWLDKKEPSSTVFVSFGSEYFPSKEEMEEIAHGLEASEVNFIWVV
RFPQGDNTSGIEDALPKGFLERAGERGMVVKGWAPQAKILKHWSTGGFVSHCGWNSVMESMMFG
VPIIGVPMHVDQPFNAGLVEEAGVGVEAKRDPDGKIQRDEVAKLIKEVVVEKTREDVRKKAREM
SEILRSKGEEKFDEMVAEISLLLKI
Siraitia grosvenorii UGT74-345-2
(SEQ ID NO: 118)
MDETTVNGGRRASDVVVFAFPRHGHMSPMLQFSKRLVSKGLRVTFLITTSATESLRLNLPPSSS
LDLQVISDVPESNDIATLEGYLRSFKATVSKTLADFIDGIGNPPKFIVYDSVMPWVQEVARGRG
LDAAPFFTQSSAVNHILNHVYGGSLSIPAPENTAVSLPSMPVLQAEDLPAFPDDPEVVMNFMTS
QFSNFQDAKWIFFNTFDQLECKKQSQVVNWMADRWPIKTVGPTIPSAYLDDGRLEDDRAFGLNL
LKPEDGKNTRQWQWLDSKDTASVLYISFGSLAILQEEQVKELAYFLKDTNLSFLWVLRDSELQK
LPHNFVQETSERGLVVNWCSQLQVLSHRAVSCFVTHCGWNSTLEALSLGVPMVAIPQWVDQTTN
AKFVADVWRVGVRVKKKDERIVTKEELEASIRQVVQGEGRNEFKHNAIKNKKLAKEAVDEGGSS
DKNIEEFVKTIA
Siraitia grosvenorii UGT75-281-2
(SEQ ID NO: 119)
MGDNGDGGEKKELKENVKKGKELGRQAIGEGYINPSLQLARRLISLGVNVTFATTVLAGRRMKN
KTHQTATTPGLSFATFSDGFDDETLKPNGDLTHYFSELRRCGSESLTHLITSAANEGRPITFVI
YSLLLSWAADIASTYDIPSALFFAQPATVLALYFYYFHGYGDTICSKLQDPSSYIELPGLPLLT
SQDMPSFFSPSGPHAFILPPMREQAEFLGRQSQPKVLVNTFDALEADALRAIDKLKMLAIGPLI
PSALLGGNDSSDASFCGDLFQVSSEDYIEWLNSKPDSSVVYISVGSICVLSDEQEDELVHALLN
SGHTFLWVKRSKENNEGVKQETDEEKLKKLEEQGKMVSWCRQVEVLKHPALGCFLTHCGWNSTI
ESLVSGLPVVAFPQQIDQATNAKLIEDVWKTGVRVKANTEGIVEREEIRRCLDLVMGSRDGQKE
EIERNAKKWKELARQAIGEGGSSDSNLKTFLWEIDLEI
Siraitia grosvenorii UGT720-269-4
(SEQ ID NO: 120)
MAEQAHDLLHVLLFPFPAEGHIKPFLCLAELLCNAGFHVTFLNTDYNHRRLHNLHLLAARFPSI
HFESISDGLPPDQPRDILDPKFFISICQVTKPLFRELLLSYKRISSVQTGRPPITCVITDVIFR
FPIDVAEELDIPVFSFCTFSAREMFLYEWIPKLIEDGQLPYPNGNINQKLYGVAPEAEGLLRCK
DLPGHWAFADELKDDQLNFVDQTTASSRSSGLILNTFDDLEAPFLGRLSTIFKKIYAVGPIHSL
LNSHHCCLWKEDHSCLAWLDSRAAKSVVFVSFGSLVKITSRQLMEFWHGLLNSGKSFLFVLRSD
VVEGDDEKQVVKEIYETKAEGKWLVVGWAPQEKVLAHEAVGGFLTHSGWNSILESIAAGVPMIS
CPKIGDQSSNCTWISKVWKIGLEMEDRYDRVSVETMVRSIMEQEGEKMQKTIAELAKQAKYKVS
KDGTSYQNLECLIQDIKKLNQIEGFINNPNFSDLLRV
Siraitia grosvenorii UGT94-289-2
(SEQ ID NO: 121)
MDAQQGHTTTILMLPWVGYGHLLPFLELAKSLSRRKLFHIYFCSTSVSLDAIKPKLPPSISSDD
SIQLVELRLPSSPELPPHLHTTNGLPSHLMPALHQAFVMAAQHFQVILQTLAPHLLIYDILQPW
APQVASSLNIPAINFSTTGASMLSRTLHPTHYPSSKFPISEEVLHNHWRAMYTTADGALTEEGH
KIEETLANCLHTSCGVVLVNSFRELETKYIDYLSVLLNKKVVPVGPLVYEPNQEGEDEGYSSIK
NWLDKKEPSSTVFVSFGTEYFPSKEEMEEIAYGLELSEVNFIWVLRFPQGDSTSTIEDALPKGF
LERAGERAMVVKGWAPQAKILKHWSTGGLVSHCGWNSMMEGMMFGVPIIAVPMHLDQPFNAGLV
EEAGVGVEAKRDSDGKIQREEVAKSIKEVVIEKTREDVRKKAREMDTKHGPTYFSRSKVSSFGR
LYKINRPTTLTVGRFWSKQIKMKRE
Siraitia grosvenorii UGT94-289-1
(SEQ ID NO: 122)
MDAQRGHTTTILMFPWLGYGHLSAFLELAKSLSRRNFHYFCSTSVNLDAIKPKLPSSSSSDSI
QLVELCLPSSPDQLPPHLHTTNALPPHLMPTLHQAFSMAAQHFAAILHTLAPHLLIYDSFQPWA
PQLASSLNIPAINFNTTGASVLTRMLHATHYPSSKFPISEFVLHDYWKAMYSAAGGAVTKKDHK
IGETLANCLHASCSVILINSFRELEEKYMDYLSVLLNKKVVPVGPLVYEPNQDGEDEGYSSIKN
NLDKKEPSSTVFVSFGSEYFPSKEEMEEIAHGLEASEVHFTWVVRFPQGDNTSAIEDALPKGFL
ERVGERGMVVKGWAPQAKILKHWSTGGFVSHCGWNSVMESMMFGVPIIGVPMHLDQPFNAGLAE
EAGVGVEAKRDPDGKIQRDEVAKLIKEVVVEKTREDVRKKAREMSEILRSKGEEKMDEMVAAI8
LFLKI
Momordica charantia 1 (McUGT1)
(SEQ ID NO: 123)
MAQPQTQARVLVFPYPTVGHIKPFLSLAELLADGGLDVVFLSTEYNHRRIPNLEALASRFPTLH
FDTIPDGLPIDKPRVIIGGELYTSMRDGVKQRLRQVLQSYNDGSSPITCVICDVMLSGPIEAAE
ELGIPVVTFCPYSARYLCAHFVMPKLIEEGQIPFTDGNLAGEIQGVPLFGGLLRRDHLPGFWFV
KSLSDEVWSHAFLNQTLAVGRTSALIINTLDELEAPFLAHLSSTFDKIYPIGPLDALSKSRLGD
SSSSSTVLTAFWKEDQACMSWLDSQPPKSVIFVSFGSTMRMTADKLVEFNHGLVNSGTRFLCVL
RSDIVEGGGAADLIKQVGETGNGIVVEWAAQEKVLAHRAVGGFLTHCGWNSTMESIAAGVPMMC
WQIYGDQMINATWIGKVWKIGIERDDKWDRSTVEKMIKELMEGEKGAEIQRSMEKFSKLANDKV
VKGGTSFENLELIVEYLKKLKPSN
Momordica charantia 2 (McUGT2)
(SEQ ID NO: 124)
MAQPRVLLFPFPAMGHVKPFLSLAELLSDAGVEVVFLSTEYNHRRIPDIGALAARFPTLHFETI
PDGLPPDQPRVLADGHLYFSMLDGTKPRFRQLIQSLNGNPRPITCIINDVMLSSPIEVAEEFGI
PVIAFCPCSARFLSVHFFMPNFIEEAQIPYTDENPMGKIEEATVFEGLLRRKDLPGLWCAKSSN
ISFSHRFINQTIAAGRASALILNTFDELESPFLNHLSSIFPKIYCIGPLNALSRSRLGKSSSSS
SALAGFWKEDQAYMSWLESQPPRSVIFVSFGSTMKMEAWKLAEFWYGLVNSGSPFLEVFRPDCV
INSGDAAEVMEGRGRGMVVEWASQEKVLAHPAVGGFLTHCGWNSTVESIVAGVPMMCCPIVADQ
LSNATWIHKVWKTGTEGDEKWDRSTVEMMIKELMESQKGTEIRTSIEMLSKLANEKVVKGGTSL
NNFELLVEDIKTLRRPYT
Momordica charantia 3 (McUGT3)
(SEQ ID NO: 125)
MEQSDSNSDDHQHHVLLFPFPAKGHIKPFLCLAQLLCGAGLQVTFLNTDHNHRRIDDRHRRLLA
TQFPMLHFKSISDGLPPDHPRDLLDGKLIASMRRVTESLFRQLLLSYNGYGNGTNNVSNSGRRP
PISCVITDVIFSFPVEVAEELGIPVFSFATFSARFLFLYEWIPKLIQEGQLPFPDGKTNQELYG
VPGAEGIIRCKDLPGSWSVEAVAKNDPMNFVKQTLASSRSSGLILNTFEDLEAPFVTHLSNTFD
KIYTIGPIHSLLGTSHCGLWKEDYACLAWLDARPRKSVVFVSFGSLVKTTSRELMELWHGLVSS
GKSFLLVLRSDVVEGEDEEQVVKEILESNGEGKWLVVGWAPQEEVLAHEAIGGFLTHSGWNSTM
ESIAAGVPMVCWPKIGDQPSNCTWVSRVWKVGLEMEERYDRSTVARMARSMMEQEGKEMERRIA
ELAKRVKYRVGKDGESYRNLESLIRDIKITKSSN
Momordica charantia 4 (McUGT4)
(SEQ ID NO: 126)
MDAHQQAEHTTTILMLPWVGYGHLTAYLELAKALSRRNFHIYYCSTPVNIESIKPKLTIPCSSI
QFVELHLPSSDDLPPNLHTTNGLPSHLMPTLHQAFSAAAPLFEEILQTLCPHLLIYDSLQPWAP
KIASSLKIPALNFNTSGVSVIAQALHAIHHPDSKFPLSDFILHNYWKSTYTTADGCASEKTRRA
REAFLYCLNSSGNAILINTFRELEGEYIDYLSLLLNKKVIPIGPLVYEPNQDEDQDEEYRSIKN
NLDKKEPCSTVFVSFGSEYFPSNEEMEEIAPGLEESGANFIWVVRFPKLENRNGIIEEGLLERA
GERGMVIKEWAPQARILRHGSIGGFVSHCGWNSVMESIICGVPVIGVPMRVDQPYNAGLVEEAG
VGVEAKRDPDGKIQRHEVSKLIKQVVVEKTRDDVRKKVAQMSEILRRKGDEKIDEMVALISLLP
KG
Momordica charantia 5 (MCUGT5)
(SEQ ID NO: 127)
MDARQQAEHTTTILMLPWVGYGHLSAYLELAKALSRRNFHIYYCSTPVNIESIKPKLTIPCSSI
QFVELHLPFSDDLPPNLHTTNGLPSHLMPALHQAFSAAAPLFEAILQTLCPHLLIYDSLQPWAP
QIASSLKIPALNFNTTGVSVIARALHTTHHPDSKFPLSEIVLHNYWKATHATADGANPEKFRRD
LEALLCCLHSSCNAILINTFRELEGEYIDYLSLLLNKKVTPIGPLVYEPNQDEEQDEEYRSIKN
WLDKKEPYSTIFVSFGSEYFPSNEEMEEIARGLEESGANFIWVVRFHKLENGNGITEEGLLERA
GERGMVIQGWAPQARILRHGSIGGFVSHCGWNSVMESIICGVPVIGVPMGLDQPYNAGLVEEAG
VGVEAKRDPDGKIQRHEVSKLIKQVVVEKTRDDVRKKVAQMSEILRRKGDEKIDEMVALISLLL
KG
Cucumis sativus
(SEQ ID NO: 128)
MGLSPTDHVLLFPFPAKGHIKPFFCLAHLLCNAGLRVTFLSTEHHHQKLHNLTHLAAQIPSLHE
QSISDGLSLDHPRNLLDGQLFKSMPQVTKPLFRQLLLSYKDGTSPITCVITDLILRFPMDVAQE
LDIPvFCFSTFSARFLFLYFSIPKLLEDGQIPYPEGNSNQVLHGIPGAEGLLRCKDLPGYWSVE
AVANYNPMNFVNQTIATSKSHGLILNTFDELEVPFITNLSKIYKKVYTIGPIHSLLKKSVQTQY
BFWKEDHSCLAWLDSQPPRSVMFVSFGSIVKLKSSQLKEFWNGLVDSGKAFLLVLRSDALVEET
GEEDEKQKELVIKEIMETKEEGRWVIVNWAPQEKVLEHKAIGGFLTHSGWNSTLESVAVGVPMV
SWPQIGDQPSNATWLSKVWKIGVEMEDSYDRSTVESKVRSIMEHEDKKMENAIVELAKRVDDRV
SKEGTSYQNLQRLIEDIEGFKLN
Cucurbita maxima 1 (CmaUGTl)
(SEQ ID NO: 129)
MELSHTHHVLLFPFPAKGHIKPFFSLAQLLCNAGLRVTFLNTDHHHRRIHDLNRLAAOLPTLHF
DSVSDGLPPDEPRNVFDGKLYESIRQVTSSLFRELLVSYNNGTSSGRPPITCVITDVMFRFPID
IAEELGIPVFTFSTFSARFLFLIFWIPKLLEDGQLRYPEQELHGVPGAEGLIRWKDLPGFWSVE
DVADWDPMNFVNQTLATSRSSGLILNTFDELEAPFLTSLSKIYKKIYSLGPINSLLKNFQSQPQ
YNLWKEDHSCMAWLDSQPRKSVVFVSFGSVVKLTSRQLMEFWNGLVNSGMPFLLVLRSDVIEAG
EEVVREIMERKAEGRWVIVSWAPQEEVLAHDAVGGFLTHSGWNSTLESLAAGVPMISWPQIGDQ
TSNSTWISKVWRIGLQLEDGFDSSTIETMVRSIMDQTMEKTVAELAERAKNRASKNGTSYRNFQ
TLIQDIINIIETHI
Cucurbita maxima 2 (CmaUGT2)
(SEQ ID NO: 130)
MDAQKAVDTPPTTVLMLPWIGYGHLSAYLELAKALSRRNFHVYFCSTPVNLDSIKPNLIPPPSS
IQFVDLHLPSSPELPPHLHTTNGLPSHLKPTLHQAFSAAAQHFEAILQTLSPHLLIYDSLQPWA
PRIASSLNIPAINFNTTAVSIIAHALHSVHYPDSKFPFSDFVLHDYWKAKYTTADGATSEKIRR
GAEAFLYCLNASCDVVLVNSFRELEGEYMDYLSVLLKKKVVSVGPLVYEPSEGEEDEEYWRIKK
WLDEKEALSTVLVSFGSEYFPSKEEMEEIAHGLEESEANFIWVVRFPKGEESCRGIEEALPKGE
VERAGERAMVVKKWAPQGKILKHGSIGGFVSHCGWNSVLESIRFGVPVIGVPMHLDQPYNAGLL
EEAGIGVEAKRDADGKIQRDQVASLIKRVVVEKTREDIWKTVREMREVLRRRDDDMIDEMVAEI
SVVLKI
Cucurbita maxima 3 (CmaUGT3)
(SEQ ID NO: 131)
MSSNLFLKISIPFGRLRDSALNCSVFHCKLHLAIAIAMDAQQAANKSPTATTIEMLPWAGYGHL
SAYLELAKALSTRNFHIYFCSTPVSLASIKPRLIPSCSSIQFVELHLPSSDEFPPHLHTTNGLP
SRLVPTFHQAFSEAAQTFEAFLQTLRPHLLIYDSLQPWAPRIASSLNIPAINFFTAGAFAVSHV
LRAFHYPDSOFPSSDFVLHSRWKIKNTTAESPTQAKLPKIGEAIGYCLNASRCVILTNSFRELE
GKYIDYLSVILKKRVFPIGPLVYQPNQDEEDEDYSRIKNWLDRKEASSTVLVSFGSEFFLSKEE
TEAIAHGLEQSEANFIWGIRFPKGAKKNAIEEALPEGFLERAGGRAMVVEEWVPQGKILKHGSI
GGFVSHCGWNSAMESIVCGVPIIGIPMQVDQPFNAGILEEAGVGVEAKRDSDGKIQRDEVAKLI
KEVVVERTREDIRNKLEKINEILRSRREEKLDELATEISLLSRN
Cucurbita moschata 1 (CmoUGT1)
(SEQ ID NO: 132)
MELSPTHHLLLFPFPAKGHIKPFFSLAQLLCNAGARVTFLNTDHHHRRIHDLDRLAAQLPTLHE
DSVSDGLPPDESRNVFDGKLYESIRQVTSSLFRELLVSYNNGTSSGRPPITCVITDCMFRFPID
IAEELGIPVFTFSTFSARFLFLFFWIPKLLEDGQLRYPEQELHGVPGAEGLIRCKDLPGFLSDE
DVAHWKPINFVNQILATSRSSGLILNTFDELEAPFLTSLSKIYKKIYSLGPINSLLKNFQSQPQ
YNLWKEDHSCMAWLDSQPPKSVVFVSFGSVVKLTNRQLVEFWNGLVNSGKPFLLVLRSDVIEAG
EEVVRENMERKAEGRWMIVSWAPQEEVLAHDAVGGFLTHSGWNSTLESLAAGVPMISWTQIGDQ
TSNSTWVSKVWRIGLQLEDGFDSFTIETMVRSVMDQTMEKTVAELAERAKNRASKNGTSYRNFQ
TLIQDITNIIETHI
Cucurbita moschata 2 (CmoUGT2)
(SEQ ID NO: 133)
MDAQKAVDTPPTTVIMLPWIGYGHLSAYLELAKALSRRNFHVYFCSTPVNLDSIKPNLIPPPPS
IQFVDLHLPSSPELPPHLHTTNGLPSHLKPTLHQAFSAAAQHFEAILQTLSPHLLIYDSLQPWA
PRIASSLNIPAINFNTTAVSIIAHALHSVHYPDSKFPFSDFVLHDYWKAKYTTADGATSEKTRR
GVEAFLYCLNASCDVVLVNSFRELEGEYMDYLSVLLKKKVVSVGPLVYEPSEGEEDEEYWRIKK
WLDEKEALSTVLVSFGSEYFPPKEEMEEIAHGLEESEANFIWVVRFPKGEESSSRGIEEALPKG
FVERAGERAMWKKWAPQGKILKHGSIGGFVSHCGWNSVLESIRFGVPVIGAPMHLDQPYNAGL
LEEAGIGVEAKRDADGKIQRDQVASLIKQVVVEKTREDTWKKVREMREVLRRRDDDDMMIDEMV
AVISVVLKI
Cucurbita moschata 3 (CmoUGT3)
(SEQ ID NO: 134)
MDAQQAANKSPTASTIFMLPWVGYGHLSAYLELAKALSTRNFHVYFCSTPVSLASIKPRLIPSC
SSIQFVELHLPSSDEFPPHLHTTNGLPAHLVPTIHQAFAAAAQTFEAFLQTLRPHLLIYDSLQP
NAPRIASSLNIPAINFFTAGAFAVSHVLRAFHYPDSQFPSSDFVLHSRWKIKNTTAESPTQVKI
PKIGEAIGYCLNASRGVILTNSFRELEGKYIDYLSVILKKRVLPIGPLVYQPNQDEEDEDYSRI
KNWLDRKEASSTVLVSFGSEFFLSKEETEAIAHGLEQSEANFIWGIRFPKGAKKNAIEEALPEG
FLERVGGRAMVVEEWVPQGKILKHGNIGGFVSHCGWNSAMESIMCGVPVIGIPMQVDQPFNAGI
LEEAGVGVEAKRDSDGKIQRDEVAKLIKEVVVERTREDIRNKLEEINEILRTRREEKLDELATE
ISLLCKN
Prunus persica
(SEQ ID NO: 135)
MAMKQPHVIIFPFPLQGHMKPLLCLAELLCHAGLHVTYVNTHHNHQRLANRQALSTHFPTLHFE
SISDGLPEDDPRTLNSQLLIALKTSIRPHFRELLKTISLKAESNDTLVPPPSCIMTDGLVTFAE
DVAEELGLPILSFNVPCPRYLWTCLCLPKLIENGQLPFQDDDMNVEITGVPGMEGLLHRQDLPG
FCRVKQADHPSLQFAINETQTLKRASALILDTVYELDAPCISHMALMFPKIYTLGPLHALLNSQ
IGDMSRGLASHGSLWKSDLNCMTWLDSQPSKSIIYVSFGTLVHLTRAQVIEFWYGLVNSGHPFL
WVMRSDITSGDHQIPAELENGTKERGCIVDWVSQEEVLAHKSVGGFLTHSGWNSTLESIVAGLP
MICWPKLGDHYIISSTVCRQWKIGLQLNENCDRSNTESMVQTLMGSKREEIQSSMDAISKLSRD
SVAEGGSSHNNLEQLIEYIRNLQHQN
Theobronia cacao
(SEQ ID NO: 136)
MRQPHVLVLPFPAQGHIKPMLCLAELLCQAGLRVTELNTHHSHRRLNNLQDLSTREPTLHEESV
SDGLPEDHPRNLVHFMHLVHSIKNVTKPLLRDLLTSLSLKTDIPPVSCIIADGILSFAIDVAEE
LQIKVIIFRTISSCCLWSYLCVPKLIQQGELQFSDSDMGQKVSSVPEMKGSLRLHDRPYSFGLK
QLEDPNFQFFVSETQAMTRASAVIFNTFDSLEAPVLSQMIPLLPKVYTIGPLHALRKARLGDLS
QHSSFNGNLREADHNCITWLDSQPLRSVVYVSFGSHVVLTSEELLEFWHGLVNSGKRFLWVLRP
DIIAGEKDHNQIIAREPDLGTKEKGLLVDWAPQEEVLAHPSVGGFLTHCGWNSTLESMVAGVPM
LCWPKLPDQLVNSSCVSEVWKIGLDLKDMCDRSTVEKMVRALMEDRREEVMRSVDCISKLARES
VSHGGSSSSNLEMLIQELET
Corchorus capsularis
(SEQ ID NO: 137)
MDSKQKKMSVLMFPWLAYGHISPFLELAKKLSKRNFHTFFFSTPINLNSIKSKLSPKYAQSIQF
VELHLPSLPDLPPHYHTTNGLPPHLMNTLKKAFDMSSLQFSKILKTLNPDLLVYDFIQPWAPLL
ALSNKIPAVHFACTSAAMSSFSVHAFKKPCEDFPFPNIYVHGNFMNAKFNNMENCSSDDSISDQ
DRVLQCFERSTKIILVKTFEELEGKFMDYLSVLLNKKIVPTGPLTQDPNEDEGDDDERTKLLLE
WLNKKSKSSTVFVSFGSEYFLSKEEREEIAYGLELSKVNFIWVIRFPLGENKTNLEEALPQGFL
QRVSERGLVVENWAPQAKILQHSSIGGFVSHCGWSSVMESLKFGVPIIAIPMHLDQPLNARLVV
DVGVGLEVIRNHGSLEREEIAKLIKEVVLGNGNDGEIVRRKAREMSNHIKKKGEKDMDELVEEL
MLCKMKPNSCHLS
Ziziphus jujube
(SEQ ID NO: 138)
MMERQRSIKVLMFPWLAHGHISPFLELAKRLTDRNFQIYFCSTPVNLTSVKPKLSQKYSSSIKL
VELHLPSLPDLPPHYHTTNGLALNLIPTLKKAFDMSSSSFSTILSTIKPDLLIYDFLQPWAPQL
ASCMNIPAVNFLSAGASMVSFVLHSIKYNGDDHDDEFLTTELHLSDSMEAKFAEMTESSPDEHI
DRAVTCLERSNSLILIKSFRELEGKYLDYLSLSFAKKVVPIGPLVAQDTNPEDDSMDIINWLDK
KEKSSTVFVSFGSEYYLTNEEMEEIAYGLELSKVNFTWVVRFPLGQKMAVEEALPKGFLERVGE
KGMVVEDWAPQMKILGHSSIGGFVSHCGWSSLMESLKLGVPIIAMPMQLDQPINAKLVERSGVG
LEVKRDKNGRIEREYLAKVIREIVVEKARQDIEKKAREMSNIITEKGEEEIDNVVEELAKLCGM
Vitis vinifera
(SEQ ID NO: 139)
MDARQSDGISVLMFPWLAHGHISPFLQLAKKLSKRNFSIYFCSTPVNLDPIKGKLSESYSLSIQ
LVKLHLPSLPELPPQYHTTNGLPPHLMPTLKMAFDMASPNFSNILKTLHPDLLIYDFLQPWAPA
AASSLNTPAVQFLSTGATLQSFLAHRHRKPGIEFPFQEIHLPDYEIGRLNRFLEPSAGRISDRD
RANQCLERSSRFSLIKTFREIEAKYLDYVSDLTKKKMVTVGPLLQDPEDEDEATDIVEWLNKKC
EASAVFVSFGSEYFVSKEEMEEIAHGLELSNVDFIWVVRFPMGEKIRLEDALPPGFLHRLGDRG
MVVEGWAPQRKILGHSSIGGFVSHCGWSSVMEGMKFGVPIIAMPMHLDQPINAKLVEAVGVGRE
VKRDENRKLEREEIAKVIKEVVGEKNGENVRRKARELSETLRKKGDEEIDVVVEELKQLCSY
Juglans regia
(SEQ ID NO: 140)
MDTARKRIRVVMLPWLAHGHISPFLELSKKLAKRNFHIYFCSTPVNLSSIKPKLSGKYSRSIQL
VELHLPSLPELPPQYHTTKGLPPHLNATLKRAFDMAGPHFSNILKTLSPDLLIYDFLQPWAPAI
AASQNTPAINFLSTGAAMTSFVLHAMKKPGDEFPFPEIHLDECMKTRFVDLPEDHSPSDDHNHI
SDKDRALKCFERSSGFVMMKTFEELEGKYINFLSHLMQKKIVPVGPLVQNPVRGDHEKAKTLEW
LDKRKQSSAVFVSFGTEYFLSKEEMEEIAYGLELSNVNFTWVVRFPEGEKVKLEEALPEGFLQR
VGEKGMVVEGWAPQAKILMHPSIGGFVSHCGWSSVMESIDFGVPIVAIPMQLDQPVNAKVVEQA
GVGVEVKRDRDGKLEREEVATVIREVVMGNIGESVRKKEREMRDNIRKKGEEKMDGVAQELVQL
YGNGIKNV
Hevea brasiliensis
(SEQ ID NO: 141)
METLQRRKISVLMFPWLAHGHLSPELELSKKLNKRNEHVYFCSTPVNLDSIKPKLSAEYSFSIQ
LVELHLPSSPELPLHYHTTNGLPPHLMKNLKNAFDMASSSFFNILKTLKPDLLIYDFIQPWAPA
LASSLNIPAVNFLCTSMAMSCFGLHLNNQEAKFPFPGIYPRDYMRMKVFGALESSSNDIKDGER
AGRCMDQSFHLILAKTFRELEGKYIDYLSVKLMKKIVPVGPLVQDPIFEDDEKIMDHHQVIKWL
EKKERLSTVFVSFGTEYFLSTEEMEEIAYGLELSKAHFIWVVRFPTGEKINLEESLPKRYLERV
QERGKIVEGWAPQQKILRHSSIGGFVSHCGWSSIMESMKFGVPIIAMPMNLDQPVNSRIVEDAG
VGIEVRRNKSGELEREEIAKTIRKVVVEKDGKNVSRKAREMSDTIRKKGEEEIDGVVDELLQLC
DVKTNYLQ
Manihot esculenta
(SEQ ID NO: 142)
MATAQTRKISVLMFPWLAHGHLSPFLELSKKLANRNFHVYFCSTPVNLDSIKPKLSPEYHFSIQ
FVELHLPSSPELPSHYHTTNGLPPHLMKTLKKAFDMASSSFFNILKTLNPDLLIYDFLQPWAPA
LASSLNIPAVNFLCSSMAMSCFGLNLNKNKEIKFLFPEIYPRDYMEMKLFRVFESSSNQIKDGE
RAGRCIDQSFHVILAKTFRELEGKYIDYVSVKCNKKIVPVGPLVEDTIHEDDEKTMDHHHHHHD
EVIKWLEKKERSTTVFVSFGSEYFLSKEEMEEIAHGLELSKVNFIWVVRFPKGEKINLEESLPE
GYLERIQERGKIVEGWAPQRKILGHSSIGGFVSHCGWSSIMESMKLGVPIIAMPMNLDQPINSR
IVEAACVGIEVSRNQSGELEREEMAKTIRKVVVEREGVYVRRKAREMSDVLRKKGEEEIDGVVD
ELVQLCDMKTNYL
Cephalotus follicularis
(SEQ ID NO: 143)
MDLKRRSIRVLMLPWLAHGHISPFLELAKKLTNRNFLIYFCSTPINLNSIKPKLSSKYSFSIQL
VELHLPSLPELPPHYHTTNGLPLHLMNTLKTAFDMASPSFLNILKTLKPDLLICDHLQPWAPSL
ASSLNIPAIIFPTNSAIMMAFSLHHAKNPGEEFPFPSININDDMVKSINFLHSASNGLTDMDRV
LQCLERSSNTMLLKTFRQLEAKYVDYSSALLKKKIVLAGPLVQVPDNEDEKIEIIKWLDSRGQS
STVFVSFGSEYFLSKEEREDIAHGLELSKVNFIWVVRFPVGEKVKLEEALPNGEAERIGERGLV
VEGWAPQAMILSHSSIGGFVSHCGWSSMMESMKFGVPIIAMPMHIDQPLNARLVEDVGVGLBIK
RNKDGRFEREELARVIKEVLVYKNGDAVRSKAREMSEHIKKNGDQEIDGVADALVKLCEMKTNS
LNQD
Stevia rebaudiana UGT74G1
(SEQ ID NO: 144)
MAEQQKIKKSPHVLLIPFPLQGHINPFIQFGKRLISKGVKTTLVTTIHTLNSTLNHSNTTTTSI
EIQAISDGCDEGGFMSAGESYLETFKQVGSKSLADLIKKLQSEGTTIDAIIYDSMTEWVLDVAI
EFGIDGGSFFTQACVVNSLYYHVHKGLISLPLGETVSVPGFPVLQRWETPLILQNHEQIQSPWS
QMLFGQFANIDQARWVFTNSFYKLEEEVIEWTRKIWNLKVIGPTLPSMYLDKRLDDDKDNGFNL
YKANHHECMNWLDDKPKESVVYVAFGSLVKHGPEQVEEITRALIDSDVNFLWVIKHKEEGKLPE
NLSEVIKTGKGLIVAWCKQLDVLAHESVGCFVTHCGFNSTLEAISLGVPVVAMPQFSDQTTNAK
LLDEILGVGVRVKADENGIVRRGNLASCIKMIMEEERGVIIRKNAVKWKDLAKVAVHEGGSSDN
DIVEFVSELIKA
Stevia rebaudiana UGT76G1
(SEQ ID NO: 145)
MENKTETTVRRRRRIILFPVPFQGHINPTLQLANVLYSKGFSITIFHTNFNKPKTSNYPHFTFR
FILDNDPQDERISMLPTHGPLAGMRIPIINEHGADELRRELELLMLASEEDEEVSCLITDALWY
FAQSVADSLNLRRLVLMTSSLFNFHAHVSLPQFDELGYLDPDDKTRLEEQASGFPMLKVKDIKS
AYSNWQILKEILGKMIKQTKASSGVIWNSFKELEESELETVIREIPAPSFLIPLPKHLTASSSS
LLDHDRTVFQWLDQQPPSSVLYVSFGSTSEVDEKDFLEIARGLVDSKQSFLWVVRPGFVKGSTW
VEPLPDGFLGERGRIVKWVPQQEVLAHGAIGAFWTHSGWNSTLESVCEGVPMIFSDFGLDQPLN
ARYMSDVLKVGVYLENGWERGEIANAIRRVMVDEEGEYIRQNARVLKQKADVSLMKGGSSYESL
ESLVSYISSL
Stevia rebaudiana UGT85C2
(SEQ ID NO: 146)
MDAMATTEKKPHVIFIPFPAQSHIKAMLKLAQLLHHKGLQITEVNTDFIHNQFLESSGPHCLDG
APGFRFETIPDGVSHSPEASIPIRESLLRSIETNFLDRFIDLVTKLPDPPTCIISDGFLSVFTI
DAAKKLGIPVMMYWTLAACGFMGFYHIHSLIEKGFAPLKDASYLTNGYLDTVIDWVPGMEGIRL
KDFPLDWSTDLNDKVLMFTTEAPQRSHKVSHHIFHTFDELEPSIIKTLSLRYNHIYTIGPLQLL
LDQIPEEKKQTGITSLHGYSLVKEEPECFQWLQSKEPNSVVYVNFGSTTVMSLEDMTEFGWGLA
NSNHYFLWIIRSNLVIGENAVLPPELEEHIKKRGFIASWCSQEKVLKHPSVGGFLTHCGWGSTI
ESLSAGVPMICWPYSWDQLTNCRYICKEWEVGLEMGTKVKRDEVKRLVQELMGEGGHKMRNKAK
DWKEKARIAIAPNGSSSLNIDKMVKEITVLARN
Stevia rebaudiana UGT91D1
(SEQ ID NO: 147)
MYNVTYHQNSKAMATSDSIVDDRKQLHVATFPWLAEGHLLPFLQLSKLIAEKGHKVSFLSTTRN
IQRLSSHISPLINVVQLTLPRVQELPEDAEATTDVHPEDIQYLKKAVDGLQPEVTRFLEQHSPD
NIIYDFTHYWLPSIAASLGISRAYFCVITPWTIAYLAPSSDAMINDSDGRTTVEDLTTPPKWFP
FPTKVCWRKHDLARMEPYEAPGISDGYRMGMVFKGSDCLLFKCYHEFGTQWLPLLETLHQVPVV
PVGLLPPEIPGDEKDETWVSIKKWLDGKQKGSVVYVALGSEALVSQTEVVELALGLELSGLPFV
WAYRKPKGPAKSDSVELPDGFVERTRDRGLVWTSWAPQLRILSHESVCGFLTHCGSGSIVEGLM
FGHPLIMLPIFCDQPLNARLLEDKQVGIEIPRNEEDGCLTKESVARSLRSVVVENEGEIYKANA
RAISKIYNDTKVEKEYVSQFVDYLEKNARAVAIDHES
Stevia rebaudiana UGT91D2
(SEQ ID NO: 148)
MATSDSIVDDRKQLHVATFPWLAFGHILPYLQLSKLIAEKGHKVSFLSTTRNIQRLSSHISPLI
NVVQLTLPRVQELPEDAEATTDVHPEDIPYLKKASDGLQPEVTRFLEQHSPDWIIYDYTHYWLP
SIAASLGISRAHFSVTTPWAIAYMGPSADAMINGSDGRTTVEDLTTPPKWFPFPTKVCWRKHDL
ARLVPYKAPGISDGYRMGLVLKGSDCLLSKCYHEFGTQWLPLLETLHQVPVVPVGLLPPEVPGD
EKDETWVSIKKWLDGKQKGSVVYVALGSEVLVSQTEVVELALGLELSGLPFVWAYRKPKGPAKS
DSVELPDGFVERTRDRGLVWTSWAPQLRILSHESVCGFLTHCGSGSIVEGLMFGHPLIMLPIFG
DQPLNARLLEDKQVGIEIPRNEEDGCLTKESVARSLRSVVVEKEGEIYKANARELSKIYNDTKV
EKEYVSQFVDYLEKNTRAVAIDHES
Stevia rebaudiana UGT91D2e
(SEQ ID NO: 149)
MATSDSIVDDRKQLHVATFPWLAFGHILPYLQLSKLIAEKGHKVSFLSTTRNIQRLSSHISPLI
NVVQLTLPRVQELPEDAEATTDVHPEDIPYLKKASDGLQPEVTRFLEQHSPDWIIYDYTHYWLP
SIAASLGISRAHFSVTTPWAIAYMGPSADAMINGSDGRTTVEDLTTPPKWFPFPTKVCWRKHDL
ARLVPYKAPGISDGYRMGLVLKGSDCLLSKCYHEFGTQWLPLLETLHQVPVVPVGLLPPEIPGD
EKDETWVSIKKWLDGKOKGSVVYVALGSEVLVSQTEVVELALGLELSGLPFVWAYRKPKGPAKS
DSVELPDGFVERTRDRGLVWTSWAPQLRILSHESVCGFLTHCGSGSIVEGLMFGHPLIMLPIFG
DQPLNARLLEDKQVGIEIPRNEEDGCLTKESVARSLRSVVVEKEGEIYKANARELSKIYNDTKV
EKEYVSQFVDYLEKNARAVAIDHES
OsUGT1-2
(SEQ ID NO: 150)
MDSGYSSSYAAAAGMHVVICPWLAFGHLLPCLDLAQRLASRGHRVSFVSTPRNISRLPPVRPAL
APLVAFVALPLPRVEGLPDGAESTNDVPHDRPDMVELHRRAFDGLAAPFSEFLGTACADWVIVD
VFHHWAAAAALEHKVPCAMMLLGSAHMIASIADRRLERAETESPAAAGQGRPAAAPTFEVARMK
LIRTKGSSGMSLAERFSLTLSRSSLVVGRSCVEFEPETVPLLSTLRGKPITFLGLMPPLHEGRR
EDGEDATVRWLDAQPAKSVVYVALGSEVPLGVEKVHELALGLELAGTRFLWALRKPTGVSDADL
LPAGFEERTRGRGVVATRWVPQMSILAHAAVGAFLTHCGWNSTIEGLMFGHPLIMLPIFGDQGP
NARLIEAKNAGLQVARNDGDGSFDREGVAAAIRAVAVEEESSKVFQAKAKKLQEIVADMACHER
YIDGFIQQLRSYKD
Arabidopsis thaliana AAN72025.1
(SEQ ID NO: 151)
MGSISEMVFETCPSPNPIHVMLVSFQGQGHVNPLLRLGKLIASKGLLVTEVTTELWGKKMRQAN
KIVDGELKPVGSGSIRFEFFDEEWAEDDDRRADFSLYIAHLESVGIREVSKLVRRYEEANEPVS
CLINNPFIPWVCHVAEEFNIPCAVLWVQSCACFSAYYHYQDGSVSFPTETEPELDVKLPCVPVI
KNDEIPSFLHPSSRFTGFRQAILGQFKNLSKSFCVLIDSFDSLEREVIDYMSSLCPVKTVGPLE
KVARTVTSDVSGDICKSTDKCLEWLDSRPKSSVVYISFGTVAYLKQEQIEEIAHGVLKSGLSFL
NVIRPPPHDLKVETHVLPQELKESSAKGKGMIVDWCPQEQVLSHPSVACFVTHCGWNSTMESLS
SGVPVVCCPQWGDOVTDAVYLIDVFKTGVRLGRGATEERVVPREEVAFKTLEATVGEKAEELRK
NALKWKAEAEAAVAPGGSSDKNFREFVEKLGAGVTKTKDNGY
Arabidopsis thaliana AAF87256.1
(SEQ ID NO: 152)
MGSHVAQKQHVVCVPYPAQGHINPMMKVAKLLYAKGFHITFVNTVYNHNRLLRSRGPNAVDGLP
SFRFESIPDGLPETDVDVTQDIPTLCESTMKHCLAPFKELLRQINARDDVPPVSCIVSDGCMSF
TLDAAEELGVPEVLFWTTSACGFLAYLYYYRFIEKGLSPIKDESYLTKEHLDTKIDWIPSMKNL
RLKDIPSFIRTTNPDDIMLNFIIREADRAKRASAIILNTFDDLEHDVIQSMKSIVPPVYSIGPL
HLLEKQESGEYSEIGRTGSNLWREETECLDWLNTKARNSVVYVNFGSITVLSAKQLVEFAWGLA
ATGKEFLWVIRPDLVAGDEAMVPPEFLTATADRRMLASWCPQEKVLSHPAIGGFLTHCGWNSTL
ESLCGGVPMVCWPFFAEQQTNCKFSRDEWEVGIEIGGDVKREEVEAVVRELMDEEKGKNMREKA
EEWRRLANEATEHKHGSSKLNFEMLVNKVLLGE
Columba livia CIUGTI
(SEQ ID NO: 153)
MIHCGKKHICAFVTCILISASILMYSWKDPQLQNNITRKIFQATSALPASQLCRGKPAQNVITA
LEDNRTFIISPYFDDRESKVTRVIGIVHHEDVKQLYCWFCCQPDGKIYVARAKIDVHSDRFGFP
YGAADIVCLEPENCNPTHVSIHQSPHANIDQLPSFKIKNRKSETFSVDFTVCISAMFGNYNNVL
QFIQSVEMYKILGVQKVVIYKNNCSQLMEKVLKFYMEEGTVEIIPWPINSHLKVSTKWHFSMDA
KDIGYYGQITALNDCIYRNMQRSKFVVLNDADELILPLKHLDWKAMMSSLQEQNPGAGIFLFEN
HIFPKTVSTPVFNISSWNRVPGVNILQHVHREPDRKEVFNPKKMIIDPRQVVQTSVHSVLRAYG
NSVNVPADVALVYHCRVPLQEELPRESLIRDTALWRYNSSLITNVNKVLHQTVL
Haemophilus ducreyi LgtE Q9L875
(SEQ ID NO: 154)
MPTLTVAMIVKNEAQDLAECLKTVDGWVDEIVIVDSGSTDDTLKIATQFNAKVYVNSDWQGFGP
QRQFAQQYVTSDYVLWLDADERVTPELKASILQAVQHNQKNTVYKVSRLSEIFGKEIRYSGWYP
DYVVRLYPTYLAKYGDELVHEKVHYPADSRVEKLQGDLLHFTYKNIHHYLVKSASYAKAWAMQR
AKAGKKASLLDGVTHAIACFLKMYLFKAGFLDGKQGFLLAVLSAHSTFVKYADLWDRTRS
Neisseria gonorrhoeae Q5F735
(SEQ ID NO: 155)
MKKVSVLIVAKNEANHIRECIESCRFDKEVIVIDDHSADNTAEIAEGLGAKVFRRHLNGDFGAQ
KTFAIEQAGGEWVFLIDADERCTPELSDEISKIVRTGDYAAYPVERRNLFPNHPATHGAMRPDS
VCRLMPKKGGSVQGKVHETVQTPYPERRLKHFMYHYTYDNWEQYFNKFNKYTSISAEKYREQGK
PVSFVRDIILRPIWGFFKIYILNKGFLDGKMGWIMSVNHSYYTMIKYVKLYYLYKSGGKE
Rhizobium meliloti (strain 1021) ExoM P33695
(SEQ ID NO: 156)
MPNETLHIDIGVCTYRRPELAETLRSLAAMNVPERARLRVIVADNDAEPSARALVEGLRPEMPF
DILYVHCPHSNISIARNCCLDNSTGDFLAFLDDDETVSGDWLTRLLETARTTGAAAVLGPVRAH
YGPTAPRWMRSGDFHSTLPVWAKGEIRTGYTCNALLRRDAASLLGRRFKLSLGKSGGEDTDFFT
GMHCAGGTIAFSPEAWVHEPVPENPASLAWLAKRRFRSGQTHGRLLAEKAHGLROAWNIALAGA
KSGFCATAAVLCFPSAARRNRFALRAVLHAGVISGLLGLKEIEQYGAREVTSA
Rhizobium radiobacter Q44418
(SEQ ID NO: 157)
MCRCGRAVRSRPVCRPGQLVVRRSPRPRSRNHSRCRPLRLSVFPRPHRRVRHHCQRDLRWEPGR
NIAVRWKAARSHRRFRRCPFPRQLVWPVRERHRDAGDRRNQRERRRRDAYHEISEPKFRTRKRT
ESFWMNKAITVIVWLLVSLCVLAIITMPVSLQTHLVATAISLILLATIKSFNGQGAWRLVALGF
GTAIVLRYVYWRTTSTLPPVNQLENFIPGFLLYLAEMYSVVMLGLSLVIVSMPLPSRKTRPGSP
DYRPTVDVFVPSYNEDAELLANTLAAAKNMDYPADRFTVWLLDDGGSVQKRNAANIVEAQAAQR
RHEELKKLCEDLDVRYLTRERNVHAKAGNLNNGLAHSTGELVTVFDADHAPARDFLLETVGYFD
EDPRLFLVQTPHFFVNPDPIERNLRTFETMPSENEMFYGIIQRGLDKWNGAFFCGSAAVLRREA
LQDSDGFSGVSITEDCETALALHSRGWNSVYVDKPLIAGLQPATFASFIGQRSRWAQGMMQILI
FRQPLFKRGLSFTQRLCYMSSTLFWLFPFPRTIFLEAPLFYLFFDLQIFVASGGEFLAYTAAYM
LVNLMMQNYLYGSFRWPWISELYEYVQTVHLLPAVVSVIFNPGKPTFKVTAKDESIAEARLSEI
SRPFFVIFALLLVAMAFAVWRIYSEPYKADVTLVVGGWNLLNLIFAGCALGVVSERGDKSASRR
ITVKRRCEVQLGGSDTWVPASIDNVSVHGLLINIFDSATNIEKGATAIVKVKPHSEGVPETMPL
NVVRTVRGEGFVSIGCTFSPQRAVDHRLIADLIFANSEQWSEFQRVRRKKPGLIRGTAIFLAIA
LFQTQRGLYYLVRARRPAPKSAKPVGAVK
Streptococcus agalactiae cpsI 087183
(SEQ ID NO: 158)
MIKKIEKDLISVIVPIYNVEDYLVECIESLIVQTYRNIEILLINDGSTDNCATIAKEFSERDCR
VIYIEKSNGGLSEARNYGIYHSKGKYLTFVDSDDKVSSDYIANLYNAIQKHDSSIAIGGYLEFY
ERHNSIRNYEYLDKVIFVEEALLNMYDIKTYGSIFITAWGKLFHKSIFNDLEFALNKYHEDEFF
NYKAYLKANSITYIDKPLYHYRIRVGSIMNNSDNVIIARKKLDVLSALDERIKLITSLRKYSVF
LQKTEIFYVNQYFRTKKFLKQQSVMFKEDNYIBAYRMYGRLLRKVKLVDKLKLIKNRFF
Streptococcus pneumoniae cps33 054611
(SEQ ID NO: 159)
MYTFILMLLDFFQNHDFHFFMLFFVFILIRWAVIYFHAVRYKSYSCSVSDEKLFSSVIIPVVDE
PLNLFESVLNRISRHKPSEIIVVINGPKNSRLVKLCHDFNEKLENNMTPIQCYYTPVPGKRNAI
RVGLEHVDSQSDITVLVDSDTVWTPRTLS3LLKPFVCDKKIGGVTTRQKILDPERNLVTMFANL
LEEIRAEGTMKAMSVTGKVGCLPGRTIAFRNIVERVYTKFIEETFMGFHKEVSDDRSLTNLTLK
KGYKTVMQDTSVVYTDAPTSWKKFIRQQLRWAEGSQYNNLKMTPWMIRNAPLMFFIYFTDMILP
MLLISFGVNIFLLKILNITTIVYTASWWEEILYVLLGMIFSFGGRNFKAMSRMKWYYVFLIPVF
IIVLSIIMCPIRLLGLMRCSDDLGWGTRNLTE
MbUGTc13
(SEQ ID NO: 160)
MADAMATTEKKPHVIFIPFPAQSHIKAMLKLAQLLHHKGLQITFVNTDFIHNQFLESSGPHCLD
GAPGFRFETIPDGVSHSPEASIPIRESLLRSIETNFLDRFIDLVTKLPDPPTCIISDGFLSVFT
IDAAKKLGIPVMMYWTLAACGFMGFYHIHSLIEKGFAPLKDASYLTNGYLDTVIDWVPGMEGIR
LKDFPLDWSTDLNDKVLMFTTEATQRSHKVSHKIFHTFDELEPSIIKTLSLRYNHIYTIGPLQL
LLDQIPEEKKQTGITSLHGYSLVKEEPECFQWLQSKEPNSVVYVNFGSTTVMSLEDMTEFGWGL
ANSNHYFLWIIRSNLVIGENAVLPPELEEHIKKRGFIASWCSQEKVLKHFSVGGFLTHCGWGST
IESLSAGVPMICWPYSWDQLTNCRYICKEWEVGLEMGTKVKRDEVKRLVQELMGEGGHKMRNKA
KDWKEKARIAIAPNGSSSLNIDKMVKEITVLARN
MbUGTc19
(SEQ ID NO: 161)
MANHHECMNWLDDKPKESVVYVAFGSLVKIGPEQVEEITRALIDSDVNFLWVIKHKEEGKLPEN
LSEVIKTGKGLIVAWCKQLDVLAHESVGOFVTHCGENSTLEASLGVPVVAMPQFSDQTTNAKL
LDEILGVGVRVKADENGIVRRGNLASCIKMIMEEERGVIIRKNAVKWKDLAKVAVHEGGSSDND
IVEFVSELIKAGSGEQQKIKKSPHVLLIPFPLQGHINPFIQFGKRLISKGVKTTLVTTIHTLNS
TLNHSNTTTTSIEIQAISDGCDEGGFMSAGESYLETFKQVGSKSLADLIKKLQSEGTTIDAIIY
DSMTEWVLDVAIEFGIDGGSFFTQACWNSLYYHVHKGLISLPLGETVSVPGFPVLQRWETPLI
LQNHEQIQSPWSQMLFGQFANIDQARWVFTNSFYKLEEEVIEWTRKIWNLKVIGPTLPSMYLDK
RLDDDKDNGFNLYKA
MbUGT1-3
(SEQ ID NO: 162)
MENKTETTVRRRRRIILFPVPFQGHINPILQLANVLYSKGFSITIFHTNFNKPKTSNYPHFTFR
FILDNDPQDERISNLPTHGPLAGMRIPIINEHGADELRRELELLMLASEEDEEVSCLITDALWY
FAQSVADSLNLRRLVLMTSSLFNFHAHVSLPQFDELGYLDPDDKTRLEEQASGFPMLKVKDIKS
AYSNWQILKEILGKMIKQTKASSGVIWNSFKELEESELETVIREIPAPSFLIPLPKHLTASSSS
LLDHDRTVFQWLDQQPPSSVLYVSFGSTSEVDEKDFLEIARGLVDSKQSFLWVVRPGFVKGSTW
VEPLPDGFLGERGRIVKWVPQQEVLAHGAIGAFWTHSGWNSTLESVCEGVPMIFSDFGLDQPLN
ARYMSDVLKVGVYLENGWERGEIANAIRRVMVDEEGEYIRQNARVLKQKADVSLMKGGSSYESL
ESIVSYISSI
MbUGT1-2
(SEQ ID NO: 163)
MATKGSSGMSLAERFWLTLSRSSLVVGRSCVEFEPETVPLLSTLRGKPITFLGLMPPLHEGRRE
DGEDATVRWLDAQPAKSVVYVALGSEVPLGVEKVHELALGLELAGTRFLNALRKPTGVSDADLL
PAGFEERTRGRGVVATRWVPQMSILAHAAVGAFLTHCGWNSTIEGLMFGHPLIMLPIFGDQGPN
ARLIEAKNAGLQVARNDGDGSFDREGVAAAIRAVAVEEESSKVFQAKAKKLQEIVADMACHERY
IDGFIQQLRSYKDDSGYSSSYAAAAGMHVVICPWLAFGHLLPCLDLAQRLASRGHRVSFVSTPR
NISRLPPVRPALAPLVAFVALPLPRVEGLPDGAESTNDVPHDRPDMVELHRRAFDGLAAPFSEE
LGTACADWVIVDVFHHWAAAAALEHKVPCAMMLLGSAEMIASIADERLEHAETESPAAAGQGRP
AAAPTFEVARMKLIR
Coffea arabica (CaUGT_1, 6)
(SEQ ID NO: 164)
MAENHATFNVLMLPWLAHGHVSPYLELAKKLTARNFNVYLCSSPATLSSVRSKLTEKFSQSIHL
VELHLPKLPELPAEYHTTNGLPPHLMPTLKDAFDMAKPNFCNVLKSLKPDLLIYDLLQPWAPEA
ASAFNIPAVVFISSSATMTSFGLHFFKNPGTKYPYGNAIFYRDYESVFVENLTRRDRDTYRVIN
CMERSSKIILIKGFNEIEGKYFDYFSCLTGKKVVPVGPLVQDPVLDDEDCRIMQWLNKKEKGST
VFVSFGSEYFLSKKDMEEIAHGLEVSNVDFIWVVRFPKGENIVIEETLPKGFFERVGERGLVVN
GWAPQAKILTHPNVGGFVSHCGWNSVMESMKFGLPIIAMPMHLDQPINARLIEEVGAGVEVLRD
SKGKLHRERMAETINKVMKEASGESVRKKARELQEKLELKGDEEIDDVVKELVQLCATKNKRNG
LHYY
Stevia rebaudiana UGT85C1
(SEQ ID NO: 165)
MADQMAKIDEKKPHVVFIPFPAQSHIKCMLKLARILHQKGLYITFINTDTNHERLVASGGTQWL
ENAPGFWFKTVPDGFGSAKDDGVKPTDALRELMDYLKTNFFDLFLDLVLKLEVPATCIICDGCM
TFANTIRAAEKLNIPVILFWTMAACGFMAFYQAKVLKEKEIVPVKDETYLTNGYLDMEIDWIPG
MKRIRLRDLPEFILATKQNYFAFEFLFETAQLADKVSHMIIHTFEELEASLVSEIKSIFPNVYT
IGPLQLLLNKITQKETNNDSYSLWKEEPECVEWLNSKEPNSVVYVNFGSLAVMSLQDLVEFGWC
LVNSNHYFLWIIRANLIDGKPAVMPQELKEAMNEKGFVGSWCSQEEVLNHPAVGGFLTHCGWGS
IIESLSAGVPMLGWPSIGDQRANCRQMCKEWEVGMEIGKNVKRDEVEKLVRMLMEGLEGERMRK
KALEWKKSATLATCCNGSSSLDVEKLANEIKKLSRN
Arabidopsis thaliana AtUCT7303
(SEQ ID NO: 202)
MATEKTHQFHPSLHFVLFPFMAQGHMIPMIDIARLLAQRGVTITIVTTPHNAARFKNVLNRAIE
SGLAINILHVKFPYQEFGLPEGKENIDSLDSTELMVPFFKAVNLLEDPVMKLMEEMKPRPSCLI
SDVVCLPYTSIIAKNFNPKIVFHGMGCFNLLCMHVLRRNLEILENVKSDEEYFLVPSFPDRVEE
TKLQLPVKANASGDWKEIMDEMVKAEYTSYGVIVNTFQELEPPYVKDYKEAMDGKVWSIGPVSL
CNKAGADKAERGSKAAIDQDECLQWLDSKEEGSVLYVCLGSICNLPLSQLKELGLGLEESRRSF
IWVIRGSEKYKELFEWMLESGFEERIKERGLLIKGWAPQVLILSHPSVGGFLTHCGWNSTLEGI
TSGIPLITWPIFGDQFCNQKLVVQVLKAGVSAGVEEVMKWGEEDKIGVLVDKEGVKKAVEELMG
DSDDAKERRRRVKELGELAHKAVEKGGSSHSNITLLLQDIMQLAQFKN
Hordeum vulgare subsp. Vulgare HVUGT_B1
(SEQ ID NO: 204)
MAQAESERMRVVMFPWLAHGHINPYLELAKRLIASASGDHHLDVVVHLVSTPANLAPLAHHQTD
RLRLVELHLPSLPDLPPALHTTKGLPARLMPVLKRACDLAAPRFGALLDELCPDILVYDFIQPW
APLEAEARGVPAFHFATCGAAATAFFIHCLKTDRPPSAFPFESISLGGVDEDAKYTALVTVRED
STALVAERDRLPLSLERSSGFVAVKSSADIERKYMEYLSQLLGKEIIPTGPLLVDSGGSEEQRD
GGRIMRWLDGEEPGSVVFVSFGSEYFMSEHQMAQMARGLELSGVPFLWVVRFPNAEDDARGAAR
SMPPGFEPELGLVVEGWAPQRRILSHPSCGAFLTHCGWSSVLESMAAGVPMVALPLHIDQPLNA
NLAVELGAAAARVKQERFGEPTAEEVARAVRAAVKGKEGEAARRRARELQEVVARNNGNDGQIA
TLLQRMARLCGKDQAVPN
Hordeum vulgare subsp. Vulgare HVUGT_B3
(SEQ ID NO: 205)
MAEANDGGKMHVVMLPWLAFGHVLPFTEFAKRVARQGHRVTLLSAPRNTRRLIDIPPGLAGLIR
VVHvPLPRVDGLPEHAEATIDLPSDHLRPCLRRAFDAAFERELSRLLQEEAKPDWVLVDYASYW
APTAAARHGVPCAFLSLFGAAALSFFGTPETLLGIGRHAKTEPAHLTVVPEYVPFPTTVAYRGY
EARELFEPGMVPDDSGVSEGYRFAKTIEGCQLVGIRSSSEFEPEWLRLLGELYRKPVIPVGLFP
PAPQDDvAGHEATLRWLDGQAPSSVVYAAFGSEVKLTGAOLQRIALGLEASGLPFIWAFRAPTS
TETGAASGGLPEGFEERLAGRGVVCRGVVPQVKFLAHASVGGFLTHAGWNSIAEGLAHGVRLVL
LPLVFEQGLNARNIVDKNIGVEVARDEQDGSFAAGDIAAALRRVMVEDEGEGFGAKVKELAKVF
GDDEVNDQCVREFLMHLSDHSKKNQGQD
MbUGT1, 2.2
(SEQ ID NO: 206)
MATKGSSGMSLAERFWLTLSRSSLVVGRSCVEFEPETVPLLSTLRGKPITFLGLMPPLHEGRRE
DGEDATVRWLDAQPAKSVVYVALGSEVPLGVEKVHELALGLELAGTRFLWALRKPTGVSDADLL
PAGFEERTRGRGVVATRWVPQMSILAHAAVGAFLTHCGWNSTIEGLMFGHPLIMLPIFGDQGPN
ARLIEAKNAGLQVARNDGDGSFDREGVAAAIRAVAVEEESSKvFQAKAKKLQEIVADMACHERY
IDGFIQQLRSYKDDSGYSSSYAAAAGMHVVICPWLAFGHLLPCLDLAQRLASRGHRVSFVSTPR
NISRLPPVRPALAPLVAFVALPLPRVEGLPDGAESTNDVPHDRPDMVELHRRAFDGLAAPFSEF
LGTACADWVIVDVFHHWAAAAALEHKVPCAMMLLGSAEMIASIADERLEHAETESPAAAGQGRP
AAAPTFEVARMKLIR
Coffea canephora (CCUGT_1, 6) (207)
MAENHATFNVLMLPWLARGHVSPYLELAMKLTARNFNVYLCSSPATLSSVRSKLTEKFSQSIHL
VELHLPKLPELPAEYHTTNGLPPHLMPTLKDAFDMAKPNFCNVLKSLKPDLLIYDLLQPWAPEA
ASAFNTPAVVFISSSATMTSFGLHFFKNPGTKYPYGNTIFYRDYESVFVENLKKRDRDTYRVVN
CMERSSKIILIKGFKEIEGKYFDYFSCLTGKKVVPVGPLVQDPVLDDEDCRIMQWLNKKEKGST
VFVSFGSEYFLSKEDMEEIAHGLELSNVDFIWVVRFPKGENIVIEETLPKGFFERVGERGLVVN
GWAPQAKILTHPNVGGFVSHCGWNSVMESMKFGLPIVAMPMHLDQPINARLIEEVCAGVEVLRD
SKGKLHRERMAETINKVTKEASGEPARKKARELQEKLELKGDEEIDDWKELVQLCATKNKRNG
LHCYN
Coffea eugenioides (CeUGT_1, 6) (208)
MAENHATFNVLMLPWLAHGHVSPYLELAKKLTARNFNVYLCSSPATLSSVRSKLTEKFSQSIHL
VELHLPKLPELPAEYHTTNGLPPHLMPTLKDAFDMAEPNFCNVLKSLKPDLLIYDLLQPWAPEA
ASAFNIPAVVFISSSATMTSFGLHFFKNPGTKYPYGNTIFYRDYESVFVENLKRRDRDTYRVVN
CMERSSKIILIKGFKEIEGKYFDYFSCLTGKKVVPVGPLVQDPVLDDEDCRIMQWLNKKEKGST
VEVSFGSEYFLSKEDMEEIAHGLELSNVDFIWVVREPKGENIVIEETLPKGEFERVGERGLVVN
GWAPQAKILTHPNVGGFVSHCGWNSVMESMKFGLPIIAMPMHLDQPINARLIEEVGAGVEVLRD
SKGKLHRERMAETINKVTKEASGESVRKKARELQEKLELKGDEEIDDVVKELVQLCATKNKRNG
LHYN
Coffea eugenioides (CeUGT 1, 6.2) (209)
MAENHATFNVLMLPWLAHGHVSPYLELAKKLTARNFNVYLCSSPATLSSVRSKLTEKFSQSIHL
VELHLPKLPELPABYHTTNGLPPHLMPTLKDAFDMAKPNFCNVLKSLKPDLLIYDLLQPWAPEA
ASAFNIPAVVFISSSATMTSFGLHFFKNPGTKYPYGNAIFYRDYESVFVENLTRRDRDTYRVIN
CMERSSKIILIKGFNEIEGKYFDYFSCLTGKKVVPVGPLVQDPVLDDEDCEIMQWLNKKEKVST
VFVSFGSEYFLSKKDMEEIAHGLELSNVDFIWVVRFPKGENIVIEETLPKGFFERVGERGLVVN
GWAPQAKILTEPNVGGFVSHCGWNSVMESMKFGLPIIAMPMHLDQPINARLIEEVGAGVEVLRD
SKGKLHRERMAETINKVMKEASGESVRKKARELQEKMDLKGDEEIDDVVKELVQLCATKNKRNG
LHYY
Siraitia grosvenorii (SgUGT94-289-3.2) (210)
MADAAQQGDTTTILMLPWLGYGHLSAFLELAKSLSRRNFHIYFCSTSVNLDAIKPKLPSSFSDS
IQFVELHLPSSPEFPPHLHTTNGLPPTLMPALHQAFSMAAQHFESILQTLAPHLLIYDSLQPWA
PRVASSLKIPAINFNTTGVFVISQGLHPIHYPHSKFPFSEFVLHNHWKAMYSTADGASTERTRK
RGEAFLYCLHASCSVILINSFRELEGKYMDYLSVLLNKKVVPVGPLVYEPNQDGEDEGYSSIKN
NLDKKEPSSTVFVSFGSEYFPSKEEMEEIAHGLEASEVNFIWVVRFPQGDNTSGIEDALPKGFL
ERAGERGMVVKGWAPQAKILKHWSTGGFVSHCGWNSVMESMMFGVPIIGVPMHVDQPFNAGLVE
EAGVGVEAKRDPDGKIQRDEVAKLIKEVVVEKTREDVRKKAREMSEILRSKGEEKFDEMVAEIS
LLLKI
Oryza sativa (OsJUGT 1, 6)
(SEQ ID NO: 211)
MAQAERERLRVLMFPWLAHGHINPYLELATRLTTTSSSQIDVVVHLVSTPVNLAAVAHRRTDRI
SLVELHLPELPGLPPALHTTKHLPPRLMPALKRACDLAAPAFGALLDELSPDVVLYDFIQPWAP
LEAAARGVPAVHFSTCSAAATAFFLHFLDGGGGGGGRGAFPFEAISLGGAEEDARYTMLTCRDD
CTALLPKGERLPLSFARSSEFVAVKTCVEIESKYMDYLSKLVGKEIIPCGPLLVDSGDVSAGSE
ADGVMRWLDGQEPGSVVLVSFGSEYFMTEKQLAEMARGLELSGAAFVWVVRFPQQSPDGDEDDH
GAAAARAMPPGFAPARGLVVEGWAPQRRVLSHRSCGAFLTHCGWSSVMESMSAGVPMVALPLHI
DQPVGANLAAELGVAARVRQERFGEFEAEEVARAVRAVMRGGEALRRRATELREVVARRDAECD
EQIGALLHRMARLCGKGTGRAAQLGH
Panax ginseng (PsUGT94_B1)
(SEQ ID NO: 213)
MADNQNGRISIALLPFLAHGHISPFFELAKQLAKRNCNVFLCSTPINLSSIKDKDSSASIKLVE
LHLPSSPDLPPHYHTTNGLPSHLMLPLRNAFETAGPTFSEILKTLNPDLLIYDFNPSWAPEIAS
SHNIPAVYFLTTAAASSSIGLHAFKNPGEKYPFPDFYDNSNITPEPPSADNMKLLHDFIACFER
SCDIILIKSFRELEGKYIDLLSTLSDKTLVPVGPLVQDPMGHNEDPKTEQIINWLDKRAESTVV
FVCFGSEYFLSNEELEEVAIGLEISTVNFIWAVRLIEGEKKGILPEGFVQRVGDRGLVVEGWAP
QARILGHSSTGGFVSHCGWSSIAESMKFGVPVIAMARHLDQPLNGKLAAEVGVGMEVVRDENGK
YKREGIAEVIRKVVVEKSGEVIRRKARELSEKMKEKGEQEIDRALEELVQICKKKKDEQ
Stevia rebaudiana (SrUGT73E1, with optional His tag)
(SEQ ID NO: 214)
MAHHHHHHVGTGSNDDDDKSPDPNWASTSELVFIPSPGAGHLPPTVELAKLLLHRDQRLSVTII
VMNLWLGPKHNTEARPCVPSLRFVDIPCDESTMALISPNTFISAFVEHHKPRVRDIVRGIIESD
SVRLAGEVLDMECMPMSDVANEFGVPSYNYETSGAATLGLMEHLQWKRDHEGYDATELKNSDTE
LSVPSYVNPVPAKVLPEVVLDKEGGSKMFLDLAERIRESKGIIVNSCQAIERHALEYLSSNNNG
IPPVFPVGPILNLENKKDDAKTDEIMRWLNEQPESSVVFLCFGSMGSFNEKQVKEIAVAIERSG
HRFLWSLRRPTPKEKIEFPKEYENLEEVLPECFLKRTSSIGKVIGWAPQMAVLSHPSVGGFVSH
CGWNSTLESMWCGVPMAAWPLYAEQTLNAFLLVVELGLAAEIRMDYRTDTKAGYDGGMEVTVEE
IEDGIRKLMSDGEIRNKVKDVKEKSRAAVVEGGSSYASIGKFIEHVSNVTI
Oryza sativa (OsUGT1-2)
(SEQ ID NO: 215)
MADSGYSSSYAAAAGMHVVICPWLAFGHLLPCLDLAQRLASRGHRVSFVSTPRNISRLPPVRPA
LAPLVAFVALPLPRVEGLPDGAESTNDVPHDRPDMVELHRRAFDGLAAPFSEFLGTACADWVIV
DVFHHWAAAAALEHKVPCAMMLLGSAHMIASIADRRLERAETESPAAAGQGRPAAAPTFEVARM
KLIRTKGSSGMSLAERFSLTLSRSSLVVGRSCVEFEPETVPLLSTLRGKPITFLGLMPPLHEGR
REDGEDATVRWLDAQPAKSVVYVALGSEVPLGVEKVHELALGLELAGTRFLWALRKPTGVSDAD
LLPAGFEERTRGRGVVATRWVPQMSILAHAAVGAFLTHCGWNSTTEGLMFGHPLIMLPIFGDQG
PNARLIEAKNAGLQVARNDGDGSFDREGVAAAIRAVAVEEESSKVFQAKAKKLQEIVADMACHE
RYIDGFIQQLRSYKD
Camelina sativa (XP_010516905.1)
(SEQ ID NO: 216)
MASEKTLQVHPPLHFVLFPFMAQGHMIPMVDIARLLAQRGATVTIVTTRYNAGRFENVLSRAVE
SGLPINIVHVKFPYEEVGLPKGKENIDSLDSMELMVPFFKAVNMLQDPVVKLMEEMESRPSCII
SDLLLPYTSKIAKKFNIPKIVFHGISCFCLLCVHVLRRNLEILTNLKSDKEYFLVPSFPDRVEF
TKPQVTVETNASGDWKEFLDEMVEAEDTSYGVIINTFEELEPAYVKDYKDARAGNVWSIGPVSL
CNKAGVDKAERGNKATIDQDECLKWLDSKEEGSVLYVCLGSICNLPLVQLKELGLGLEESQRPF
IWVIRGWEKYNELSEWMVESGFEERIRERGLLIRGWAPQVLILSHPSVGGFLTHCGWNSTVEGI
TSGVPLITWPLFGDQFCNQTLVVQVLKAGVSVGVEEVMKWGEEEKIGVLVDKEGVKKAVEDLMG
ESDDAKERTKRVKELGGLAHKAVEEGGSSHSNITLFLQDIRQVOSV
Glycyrrhiza uralensis (UGT73F24)
(SEQ ID NO: 217)
MADVAEEQPLKIYFIPYLAAGHMIPLCDIATLFASRGHHVTIITTPSNAQTLRESHHFRVQTIQ
FPSQEVGLPAGVQNLTAVTNLDDSYKIYHATMLLRKHIEDFVERDPPDCIVADFLFPWVDDVAT
KLHIPRLVFNGFTLFTICAMESHKAHPLPVDAASGSFVIPDFPHHVTINSTPPKRTKEFVDPLL
TEAFKSHGFLINSFVELDGEECVEHYERITGGHKAWHLGPAFLVHRTAQDRGEKSVVSTQECLS
NLDSKRDNSVLYICFGTICYFPDKQLYEIASAIEASGHEFIWVVPEKRGNADESEEEKEKWLPK
GFEERNNGKKGMIIRGWAPQVAILGHPAVGGFLTHCGWNSTVEAVSAGVPMITWPVHSDQYFNE
KLITQVRGIGVEVGAEEWIVTAFRETEKLVGRDRIERAVRRVMDGGDEAVQIRRRARELGEMAR
QAVQEGGSSHTNLTALINDLKRWRDSKQLN
Glycyrrhiza uralensis (UGT73033)
(SEQ ID NO: 218)
MAVFQANQPHFVLFPLMAQGHIIPMIDIARLLAQRGAIVTIFTTPKNASRFTSVLSRAVSSGLQ
IRLVHLHFPSKEAGLPEGCENLDMVASHDMICNIFQAIRMLQKQAEELFETLTPKPSCIISDFC
IPWTTQVAEKEHIPRISFHGFSCFCLHCMLKIHTSKVLEGITSESEYETVPGIPDQIQVTKQQV
PGPMIDEMKEFGEQMRDAEIRSYGVIINTFEELEKAYVNDYKKERNGKVWCIGPVSLCNKDGLD
KAQRGNKASISEHHCLEWLDLQQPNSVIYVCLGSLCNLTPPQLMELALGLEATKRPFTWVIREG
NKFEELEKWISEEGFEERIKGRGLIIRGWAPQVLILSHPSIGGFLTHCGWNSTLEGVTAGVPMV
TWPLFADQFLNEKLVTQVLRIGVSLGVDVPLKWGEEEKVGVQVKKEGIEKAICMVMDEGEESKE
RRERAKELSEMAKRAVEKDGSSHLNMTMLIQDIMQQSSSKVET

1. A method for making mogrol or mogroside, comprising:
providing a recombinant microbial host cell expressing a heterologous enzyme pathway catalyzing the conversion of isopentenyl pyrophosphate (IPP) and dimethylallyl pyrophosphate (DMAPP) to mogrol or mogroside, the pathway comprising at least one of:
(A) at least two squalene epoxidase enzymes (SQE) for converting squalene to 2,3;22,23 dioxidosqualene;
(B) at least one triterpene cyclase enzyme for converting 22,23-dioxidosqualene to 24,25-epoxycucurbitadienol, the triterpene cyclase enzyme comprising an amino acid sequence that is at least 70% identical to one of SEQ ID NO: 191, SEQ ID NO: 192, and SEQ ID NO: 193;
(C) at least one epoxide hydrolase converting 24,25-epoxycucurbitadienol to 24,25-dihydroxycucurbitadienol, the at least one epoxide hydrolase comprising an amino acid sequence that is at least 70% identical to any one of SEQ ID NOS. 189, 58, 184, 185, 187, 188, 190, and 212;
(D) a cytochrome P450 enzyme comprising an amino acid sequence having at least 70% sequence identity with an amino acid sequence selected from SEQ ID NO: 194 and SEQ ID NO: 171; and
(E) at least one uridine diphosphate dependent glycosyltransferase (UGT) enzyme comprising an amino acid sequence having at least 70% sequence identity to any one of SEQ ID NO: 164, 165, 138, 204 to 211, 213 to 218; and
culturing the host cell under conditions for producing the mogrol or mogroside.

2. The method of claim 1, wherein at least one squalene epoxidase comprises an amino acid sequence that is at least 70% identical to any one of SEQ ID NOS: 17 to 39, 168 to 170, and 177 to 183.

3. The method of claim 2, wherein at least one squalene epoxidase comprises an amino acid sequence that is at least 70% identical to SEQ ID NO: 39.

4. The method of claim 3, wherein the at least one SQE comprises an amino acid sequence that is at least 80%, or at least 85%, or at least 90° %, or at least 95%, or at least 98%, or at least 99% identical to SEQ ID NO: 39.

5. The method of claim 3, wherein the SQE comprises an amino acid sequence having from 1 to 20 amino acid modifications with respect to SEQ ID NO: 39, the amino acid modifications being independently selected from amino acid substitutions, deletions, and insertions.

6. The method of claim 3, wherein the host cell comprises two squalene epoxidase enzymes that each comprise an amino acid sequence that is at least 70% identical to SEQ ID NO: 39.

7. The method of claim 6, wherein one of the SQE enzymes has one or more amino acid modifications that improve specificity or productivity for conversion of 2,3-oxidosqualene to 2,3;22,23 dioxidosqualene, as compared to the enzyme having the amino acid sequence of SEQ ID NO: 39.

8. The method of claim 6 or 7, wherein the amino acid modifications to the squalene epoxidase comprise one or more modifications at positions corresponding to the following positions of SEQ ID NO: 39: 35, 133, 163, 254, 283, 380, and 395.

9. The method of claim 8, wherein the amino acid modifications to the squalene epoxidase comprise two, three, four, five, or six amino acid modifications selected from substitutions at positions corresponding to positions 35, 133, 163, 254, 283, 380, and 395 of SEQ ID NO: 39.

10. The method of claim 8 or 9, wherein the amino acid modifications are selected from:
the amino acid at the position corresponding to position 35 of SEQ ID NO: 39 is arginine or lysine;
the amino acid at the position corresponding to position 133 of SEQ ID NO: 39 is glycine, alanine, leucine, isoleucine, or valine;
the amino acid at the position corresponding to position 163 of SEQ ID NO: 39 is glycine, alanine, leucine, isoleucine, or valine;
the amino acid at the position corresponding to position 254 of SEQ ID NO: 39 is phenylalanine, alanine, leucine, isoleucine, or valine;
the amino acid at the position corresponding to position 283 of SEQ ID NO: 39 is alanine, leucine, isoleucine, or valine.
the amino acid at the position corresponding to position 380 of SEQ ID NO: 39 is alanine, leucine, or glycine; and
the amino acid at the position corresponding to position 395 of SEQ ID NO: 39 is tyrosine, serine, or threonine.

11. The method of claim 10, wherein the squalene epoxidase comprises the amino acid substitutions: H35R, F163A, M283L, V380L, and F395Y, numbered according to SEQ ID NO: 39.

12. The method of claim 10, wherein the squalene epoxidase comprises the amino acid substitutions: H35R, N133G, F163A, Y254F, V380L, and F395Y, numbered according to SEQ ID NO: 39.

13. The method of any one of claims 1 to 12, wherein the heterologous enzyme pathway further comprises a squalene synthase (SQS).

14. The method of claim 13, wherein the SQS comprises an amino acid sequence that is at least 70% identical to an amino acid sequence selected from SEQ ID NOS: 2 to 16, 166, and 167.

15. The method of claim 14, wherein the SQS comprises an amino acid sequence that is at least 70% identical to SEQ ID NO: 11.

16. The method of claim 15, wherein the SQS comprises an amino acid sequence that is at least 80%, or at least 85%, or at least 90%, or at least 95%, or at least 98%, or at least 99% identical to SEQ ID NO: 11.

17. The method of claim 15, wherein the SQS comprises an amino acid sequence having from 1 to 20 amino acid modifications with respect to SEQ ID NO: 11, the amino acid modifications being independently selected from amino acid substitutions, deletions, and insertions.

18. The method of claim 14, wherein the SQS comprises an amino acid sequence that is at least 80%, or at least 85%, or at least 90%, or at least 95%, or at least 98%, or at least 99% identical to SEQ ID NO: 2, SEQ ID NO: 14, SEQ ID NO: 16, SEQ ID NO. 166, or SEQ ID NO: 167.

19. The method of any one of claims 1 to 18, wherein the heterologous enzyme pathway comprises at least one triterpene cyclase (TTC).

20. The method of claim 19, wherein at least one TTC comprises an amino acid sequence that is at least 70% identical to an amino acid sequence selected from SEQ ID NOS: 40 to 55, 191 to 193, and 219 to 220.

21. The method of claim 20, wherein the heterologous enzyme pathway comprises at least two enzymes having triterpene cyclase activity and converting 22,23-dioxidosqualene to 24,25-epoxycucurbitadienol.

22. The method of claim 20 or 21, wherein the TTC comprises an amino acid sequence that is at least 70% identical to the amino acid sequence of SEQ ID NO: 40.

23. The method of claim 22, wherein the TTC comprises an amino acid sequence that is at least 80%, or at least 85%, or at least 90%, or at least 95%, or at least 98%, or at least 99% identical to SEQ ID NO: 40.

24. The method of claim 23, wherein the TTC comprises an amino acid sequence having from 1 to 20 amino acid modifications with respect to SEQ ID NO: 40, the amino acid modifications being independently selected from amino acid substitutions, deletions, and insertions.

25. The method of any one of claims 19 to 24, wherein the heterologous enzyme pathway comprises at least one TTC that comprises an amino acid sequence that is at least 70% identical to one of SEQ ID NO: 191, SEQ ID NO: 192, and SEQ ID NO: 193.

26. The method of claim 25, wherein at least one TTC comprises an amino acid sequence that is at least 80%, or at least 85%, or at least 90%, or at least 95%, or at least 98%, or at least 99% identical to one of SEQ ID NOS: 191, 192, and 193.

27. The method of claim 26, wherein the TTC comprises an amino acid sequence having from 1 to 20 amino acid modifications with respect to one of SEQ ID NOS: 191, 192, and 193, the amino acid modifications being independently selected from amino acid substitutions, deletions, and insertions.

28. The method of any one of claims 1 to 27, wherein the heterologous pathway comprises an enzyme that converts cucurbitadienol to 24,25-epoxycucurbitadienol.

29. The method of claim 28, wherein the enzyme converting cucurbitadienol to 24,25-epoxycucurbitadienol comprises an amino acid sequence having at least about 70% sequence identity to SEQ ID NO: 221.

30. The method of any one of claims 1 to 29, wherein the heterologous enzyme pathway comprises an epoxide hydrolase (EPH).

31. The method of claim 30, wherein the EPH comprises an amino acid sequence that is at least 70% identical to amino acid sequence selected from SEQ ID NOS: 56 to 72, 184 to 190, and 212.

32. The method of claim 31, wherein the EPH comprises an amino acid sequence that is at least 80%, or at least 85%, or at least 90%, or at least 95%, or at least 98%, or at least 99% identical to one of SEQ ID NOS: 56 to 72, 184 to 190, and 212.

33. The method of claim 32, wherein the EPH comprises an amino acid sequence having from 1 to 20 amino acid modifications with respect to one of SEQ ID NOS: 56 to 72, 184 to 190, and 212, the amino acid modifications being independently selected from amino acid substitutions, deletions, and insertions.

34. The method of claim 31, wherein the heterologous pathway comprises at least one EPH converting 24,25-epoxycucurbitadienol to 24,25-dihydroxycucurbitadienol, the at least one EPH comprising an amino acid sequence that is at least 70% identical to one of: SEQ ID NOS: 189, 58, 184, 185, 187, 188, 190, and 212.

35. The method of claim 34, wherein the EPH comprises an amino acid sequence that is at least 80%, or at least 85%, or at least 90%, or at least 95%, or at least 98%, or at least 99% identical to one of SEQ ID NOS: 189, 58, 184, 185, 187, 188, 190, and 212.

36. The method of claim 35, wherein the EPH comprises an amino acid sequence having from 1 to 20 amino acid modifications with respect to one of SEQ ID NOS: 189, 58, 184, 185, 187, 188, 190, and 212, the amino acid modifications being independently selected from amino acid substitutions, deletions, and insertions.

37. The method of any one of claims 1 to 36, wherein the heterologous pathway comprises one or more oxidases that oxidize C11 of C24,25 dihydroxycucurbitadienol to produce mogrol.

38. The method of claim 37, wherein at least one oxidase is a cytochrome P450 enzyme.

39. The method of claim 38, wherein at least one cytochrome P450 enzyme comprises an amino acid sequence that is at least 70% identical to an amino acid sequence selected from SEQ ID NOS: 73 to 91, 171 to 176, and 194 to 200.

40. The method of claim 39, wherein at least one cytochrome P450 enzyme comprises an amino acid sequence that is at least 80%, or at least 85%, or at least 90%, or at least 95%, or at least 98%, or at least 99% identical to one of SEQ ID NOS: 73 to 91, 171 to 176, and 194 to 200.

41. The method of claim 40, wherein at least one cytochrome P450 enzyme comprises an amino acid sequence having from 1 to 20 amino acid modifications with respect to one of SEQ ID NOS: 73 to 91, 171 to 176, and 194 to 200, the amino acid modifications being independently selected from amino acid substitutions, deletions, and insertions.

42. The method of any one of claims 37 to 41, wherein the cytochrome P450 comprises an amino acid sequence that is at least 70% identical to an amino acid sequence selected from SEQ ID NO: 194 and SEQ ID NO: 171.

43. The method of claim 42, wherein the cytochrome P450 enzyme comprises an amino acid sequence that is at least 80%, or at least 85%, or at least 90%, or at least 95%, or at least 98%, or at least 99% identical to one of SEQ ID NOS: 194 and 171.

44. The method of claim 43, wherein at least one cytochrome P450 enzyme comprises an amino acid sequence having from 1 to 20 amino acid modifications with respect to one of SEQ ID NOS: 194 and 171, the amino acid modifications being independently selected from amino acid substitutions, deletions, and insertions.

45. The method of any one of claims 42 to 44, wherein the cytochrome P450 enzyme has at least a portion of its transmembrane region substituted with a heterologous transmembrane region.

46. The method of claim 37, wherein at least one oxidase is a non-heme iron oxidase.

47. The method of claim 46, wherein the non-heme iron oxidase comprises an amino acid sequence that is at least 70% identical to an amino acid sequence selected from SEQ ID NOS: 100 to 115.

48. The method of any one of claims 37 to 47, wherein the microbial host cell expresses one or more electron transfer proteins selected from a cytochrome P450 reductase (CPR), flavodoxin reductase (FPR) and ferredoxin reductase (FDXR) sufficient to regenerate the one or more oxidases.

49. The method of claim 48, wherein the microbial host cell expresses a cytochrome P450 reductase comprising an amino acid sequence that is at least 70% identical to one of SEQ ID NOS: 92 to 99 and 201.

50. The method of claim 49, wherein the cytochrome P450 reductase comprises an amino acid sequence that is at least 80%, or at least 85%, or at least 90%, or at least 95%, or at least 98%, or at least 99% identical to one of SEQ ID NOS: 92 to 99 and 201.

51. The method of claim 49, wherein the microbial host cell expresses SEQ ID NO: 194 or a derivative thereof, and SEQ ID NO: 98 or a derivative thereof.

52. The method of claim 49, wherein the microbial host cell expresses SEQ ID NO. 171 or a derivative thereof, and SEQ ID NO: 201 or a derivative thereof.

53. The method of any one of claims 1 to 52, wherein the heterologous enzyme pathway comprises one or more uridine diphosphate-dependent glycosyltransferase (UGT) enzymes, thereby producing one or more mogrol glycosides.

54. The method of claim 53, wherein the one or more mogrol glycosides are selected from Mog.II-E, Mog.III, Mog.III-A1, Mog.II-A2, Mog.III, Mog.IV, Mog.IV-A, siamenoside, Mog.V, and Mog.VI.

55. The method of claim 53, wherein the one or more mogrol glycosides include Mog.VI, Isomog.V, and Mog.V.

56. The method of claim 53, wherein the host cell produces Mog.V or siamenoside.

57. The method of any one of claims 53 to 56, wherein at least one UGT enzyme comprises an amino acid sequence that is at least 70% identical to an amino acid sequence selected from SEQ ID NOS: 116 to 165, 202 to 210, 211, 213 to 218.

58. The method of claim 57, wherein at least one UGT enzyme comprises an amino acid sequence that is at least 80%, or at least 85%, or at least 90%, or at least 95%, or at least 98%, or at least 99% identical to one of SEQ ID NOS: 116 to 165, 202 to 210, 211, 213 to 218.

59. The method of claim 58, wherein at least one UGT enzyme comprises an amino acid sequence having from 1 to 20 amino acid modifications with respect to one of SEQ ID NOS: 116 to 165, 202 to 210, 211, 213 to 218, the amino acid modifications being independently selected from amino acid substitutions, deletions, and insertions.

60. The method of any one of claims 53 to 59, wherein at least one uridine diphosphate dependent glycosyltransferase (UGT) enzyme comprises an amino acid sequence having at least 70% sequence identity to one of SEQ ID NO: 164, 165, 138, 204 to 211, and 213 to 218.

61. The method of claim 60, wherein at least one UGT enzyme comprises an amino acid sequence that is at least 70% identical to SEQ ID NO: 165.

62. The method of claim 61, wherein at least one UGT enzyme comprises an amino acid sequence that is at least 80%, or at least 85%, or at least 90%, or at least 95%, or at least 98%, or at least 99% identical to SEQ ID NO: 165; or comprises an amino acid sequence having from 1 to 20 amino acid modifications with respect to SEQ ID NO: 165, the amino acid modifications being independently selected from amino acid substitutions, deletions, and insertions.

63. The method of claim 62, wherein the at least one UGT enzyme comprises a substitution at one or more of positions 41, 49, and 127, with respect to SEQ ID NO: 165, wherein said one or more substitutions optionally include one or more of: L41F, D49E, and C127F.

64. The method of claim 60, wherein at least one UGT enzyme comprises an amino acid sequence that is at least 70% identical to SEQ ID NO: 164.

65. The method of claim 64, wherein at least one UGT enzyme comprises an amino acid sequence that is at least 80%, or at least 85%, or at least 90%, or at least 95%, or at least 98%, or at least 99% identical to SEQ ID NO: 164; or comprises an amino acid sequence having from 1 to 20 amino acid modifications with respect to SEQ ID NO: 164, the amino acid modifications being independently selected from amino acid substitutions, deletions, and insertions.

66. The method of claim 65, wherein the at least one UGT enzyme comprises one or substitutions listed in Table 3, with respect to SEQ ID NO: 164, and optionally having one or more amino acid substitutions selected from S150F, T147L, N207K, K270E, V281L, L354V, L13F, T32A, and K101A with respect to SEQ ID NO: 164.

67. The method of claim 59, wherein at least one UGT enzyme comprises an amino acid sequence that is at least 70% identical to SEQ ID NO: 138.

68. The method of claim 67, wherein at least one UGT enzyme comprises an amino acid sequence that is at least 80%, or at least 85%, or at least 90%, or at least 95%, or at least 98%, or at least 99% identical to SEQ ID NO: 138; or comprises an amino acid sequence having from 1 to 20 amino acid modifications with respect to SEQ ID NO: 138, the amino acid modifications being independently selected from amino acid substitutions, deletions, and insertions.

69. The method of claim 60, wherein at least one UGT enzyme comprises an amino acid sequence that is at least 70% identical to SEQ ID NO: 204.

70. The method of claim 69, wherein at least one UGT enzyme comprises an amino acid sequence that is at least 80%, or at least 85%, or at least 90%, or at least 95%, or at least 98%, or at least 99% identical to SEQ ID NO: 204; or comprises an amino acid sequence having from 1 to 20 amino acid modifications with respect to SEQ ID NO: 204, the amino acid modifications being independently selected from amino acid substitutions, deletions, and insertions.

71. The method of claim 60, wherein at least one UGT enzyme comprises an amino acid sequence that is at least 70% identical to SEQ ID NO: 205.

72. The method of claim 71, wherein at least one UGT enzyme comprises an amino acid sequence that is at least 80%, or at least 85%, or at least 90%, or at least 95%, or at least 98%, or at least 99%/o identical to SEQ ID NO: 205; or comprises an amino acid sequence having from 1 to 20 amino acid modifications with respect to SEQ ID NO: 205, the amino acid modifications being independently selected from amino acid substitutions, deletions, and insertions.

73. The method of claim 60, wherein at least one UGT enzyme comprises an amino acid sequence that is at least 70% identical to SEQ H) NO: 206.

74. The method of claim 73, wherein at least one UGT enzyme comprises an amino acid sequence that is at least 80%, or at least 85%, or at least 90/o, or at least 95%, or at least 98%, or at least 99% identical to SEQ ID NO: 206; or comprises an amino acid sequence having from 1 to 20 amino acid modifications with respect to SEQ ID NO: 206, the amino acid modifications being independently selected from amino acid substitutions, deletions, and insertions.

75. The method of claim 60, wherein at least one UGT enzyme comprises an amino acid sequence that is at least 70% identical to SEQ ID NO: 207; or wherein at least one UGT enzyme comprises an amino acid sequence that is at least 80%, or at least 85%, or at least 90%, or at least 95%, or at least 98%, or at least 99% identical to SEQ ID NO: 207.

76. The method of claim 60, wherein at least one UGT enzyme comprises an amino acid sequence that is at least 70% identical to SEQ ID NO: 208; or wherein at least one UGT enzyme comprises an amino acid sequence that is at least 80%, or at least 85%, or at least 90%, or at least 95%, or at least 98%, or at least 99% identical to SEQ ID NO: 208.

77. The method of claim 60, wherein at least one UGT enzyme comprises an amino acid sequence that is at least 70% identical to SEQ ID NO: 209, or wherein at least one UGT enzyme comprises an amino acid sequence that is at least 80%, or at least 85%, or at least 90%, or at least 95%, or at least 98%, or at least 99% identical to SEQ ID NO: 209.

78. The method of claim 60, wherein at least one UGT enzyme comprises an amino acid sequence that is at least 70% identical to SEQ ID NO: 210; or wherein at least one UGT enzyme comprises an amino acid sequence that is at least 80%, or at least 85%, or at least 90%, or at least 95%, or at least 98%, or at least 99% identical to SEQ ID NO: 210.

79. The method of claim 60, wherein at least one UGT enzyme comprises an amino acid sequence that is at least 70% identical to SEQ ID NO: 211; or wherein at least one UGT enzyme comprises an amino acid sequence that is at least 80%, or at least 85%, or at least 90%, or at least 95%, or at least 98%, or at least 99% identical to SEQ ID NO: 211.

80. The method of claim 60, wherein at least one UGT enzyme comprises an amino acid sequence that is at least 70% identical to SEQ ID NO: 213; or wherein at least one UGT enzyme comprises an amino acid sequence that is at least 80%, or at least 85%, or at least 90%, or at least 95%, or at least 98%, or at least 99% identical to SEQ ID NO: 213.

81. The method of claim 60, wherein at least one UGT enzyme comprises an amino acid sequence that is at least 70% identical to SEQ ID NO: 214; or wherein at least one UGT enzyme comprises an amino acid sequence that is at least 80%, or at least 85%, or at least 90%, or at least 95%, or at least 98%, or at least 99% identical to SEQ ID NO: 214.

82. The method of claim 60, wherein at least one UGT enzyme comprises an amino acid sequence that is at least 70% identical to SEQ ID NO: 215; or wherein at least one UGT enzyme comprises an amino acid sequence that is at least 80%, or at least 85%, or at least 90%, or at least 95%, or at least 98%, or at least 99% identical to SEQ ID NO: 215.

83. The method of claim 60, wherein at least one UGT enzyme comprises an amino acid sequence that is at least 70% identical to SEQ ID NO: 218; or wherein at least one UGT enzyme comprises an amino acid sequence that is at least 80%, or at least 85%, or at least 90%, or at least 95%, or at least 98%, or at least 99% identical to SEQ ID NO: 218.

84. The method of claim 60, wherein at least one UGT enzyme comprises an amino acid sequence that is at least 70% identical to SEQ ID NO: 217; or wherein at least one UGT enzyme comprises an amino acid sequence that is at least 80%, or at least 85%, or at least 90%, or at least 95%, or at least 98%, or at least 99% identical to SEQ ID NO. 217, and optionally having one or more amino acid substitutions selected from A74E, 191F, H101P, Q241E, and I436L.

85. The method of claim 60, wherein at least one UGT enzyme comprises an amino acid sequence that is at least 70% identical to SEQ ID NO: 216; or wherein at least one UGT enzyme comprises an amino acid sequence that is at least 80%, or at least 85%, or at least 90%, or at least 95%, or at least 98%, or at least 99%/o identical to SEQ ID NO-216.

86. The method of any one of claims 60 to 85, wherein at least one UGT enzyme further comprises an amino acid sequence that is at least 70% identical to SEQ ID NO: 146.

87. The method of claim 86, wherein at least one UGT enzyme comprises an amino acid sequence that is at least 80%, or at least 85%, or at least 90%, or at least 95%, or at least 98%, or at least 99% identical to SEQ ID NO: 146, or at least one UGT enzyme comprises an amino acid sequence having from 1 to 20 amino acid modifications with respect to SEQ ID NO: 146, the amino acid modifications being independently selected from amino acid substitutions, deletions, and insertions.

88. The method of any one of claims 60 to 87, wherein at least one UGT enzyme further comprises an amino acid sequence that is at least 70% identical to SEQ ID NO: 202.

89. The method of claim 88, wherein at least one UGT enzyme comprises an amino acid sequence that is at least 80%, or at least 85%, or at least 90%, or at least 95%, or at least 98%, or at least 99% identical to SEQ ID NO: 202; or at least one UGT enzyme comprises an amino acid sequence having from 1 to 20 amino acid modifications with respect to SEQ ID NO: 202, the amino acid modifications being independently selected from amino acid substitutions, deletions, and insertions.

90. The method of any one of claims 60 to 89, wherein at least one UGT enzyme is a circular permutant of a wild-type UGT enzyme, or a derivative thereof.

91. The method of any one of claims 60 to 90, wherein the microbial host cell expresses at least three UGT enzymes: a first UGT enzyme catalyzing primary glycosylation at the C24 hydroxyl of mogrol, a second UGT enzyme catalyzing primary glycosylation at the C3 hydroxyl of mogrol, and a third UGT enzyme catalyzing one or more branching glycosylation reactions.

92. The method of claim 91, wherein the microbial host cell expresses one or two UGT enzymes catalyzing beta 1,2 and/or beta 1,6 branching glycosylations of the C3 and/or C24 primary glycosylations.

93. The method of any one of claims 53 to 57, wherein the UGT enzymes comprise three or four UGT enzymes selected from:
SEQ ID NO: 165 or a derivative thereof,
SEQ ID NO: 146 or a derivative thereof;
SEQ ID NO: 214 or a derivative thereof,
SEQ ID NO: 129 or a derivative thereof;
SEQ ID NO: 164 or a derivative thereof,
SEQ ID NO: 116 or a derivative thereof,
SEQ ID NO: 202 or a derivative thereof,
SEQ ID NO: 218 or a derivative thereof;
SEQ ID NO: 217 or a derivative thereof,
SEQ ID NO: 138 or a derivative thereof,
SEQ ID NO: 204 or a derivative thereof;
SEQ ID NO: 205 or a derivative thereof;
SEQ ID NO: 207 or a derivative thereof,
SEQ ID NO: 208 or a derivative thereof,
SEQ ID NO: 209 or a derivative thereof,
SEQ ID NO: 11 or a derivative thereof;
SEQ ID NO: 215 or a derivative thereof;
SEQ ID NO: 213 or a derivative thereof;
SEQ ID NO: 206 or a derivative thereof;
SEQ ID NO: 122) or a derivative thereof; and
SEQ ID NO: 210) or a derivative thereof.

94. The method of any one of claims 1 to 93, wherein the microbial host cell is prokaryotic or eukaryotic, and is optionally a bacteria selected from Escherichia coli, Bacillus subtilis, Corynebacterium glutamicum, Rhodobacter capsulatus, Rhodobacter sphaeroides, Zymomonas mobilis, Vibrio natriegens, or Pseudomonas putida; or is a yeast selected from a species of Saccharomyces, Pichia, or Yarrowia, and which is optionally Saccharomyces cerevisiae, Pichia pastoris, and Yarrowia lipolytica.

95. The method of claim 94, wherein the microbial host cell is E. coli.

96. The method of claim 94 or 95, wherein the microbial host cell is a bacterium that produces increased MEP pathway products.

97. The method of any one of claims 1 to 96, wherein the heterologous enzyme pathway comprises a farnesyl diphosphate synthase (FPPS).

98. The method of any one of claims 1 to 97, wherein microbial host cell has one or more genetic modifications that increase the production or availability of UDP-glucose.

99. The method of claim 98, wherein the microbial host cell is a bacterial cell having one or more genetic modifications selected from ΔgalE, ΔgalT, ΔgalK, ΔgalM, ΔushA, Δagp, Δpgm, duplication or overexpression of E. coli GALU, expression of Bacillus subtilis UGPA, and expression of Bifidobacterium adolescentis SPL.

100. The method of any one of claims 1 to 99, wherein the mogrol glycoside products are recovered from the extracellular media.

101. A method for making a product comprising a mogrol glycoside, comprising:
producing a mogrol glycoside in accordance with any one of claims 1 to 100, and incorporating the mogrol glycoside into a product.

102. The method of claim 101, wherein the product is a sweetener composition, flavoring composition, food, beverage, chewing gum, texturant, pharmaceutical composition, tobacco product, nutraceutical composition, or oral hygiene composition.

103. The method of claim 101 or 102, wherein the product further comprises one or more of a steviol glycoside, aspartame, and neotame.

104. The method of claim 103, wherein the steviol glycoside comprises one or more of RebM, RebB, RebD, RebA, RebE, and RebI.

105. A microbial host cell expressing a heterologous enzyme pathway catalyzing the conversion of isopentenyl pyrophosphate (IPP) and dimethylallyl pyrophosphate (DMAPP) to mogrol or mogroside, the pathway comprising at least one of:
(A) at least two squalene epoxidase enzymes (SQE) for converting squalene to 2,3;22,23 dioxidosqualene;
(B) at least one triterpene cyclase enzyme for converting 22,23-dioxidosqualene to 24,25-epoxycucurbitadienol, the triterpene cyclase enzyme comprising an amino acid sequence that is at least 70% identical to one of SEQ ID NO: 191, SEQ ID NO: 192, and SEQ ID NO: 193;
(C) at least one epoxide hydrolase converting 24,25-epoxycucurbitadienol to 24,25-dihydroxycucurbitadienol, the at least one epoxide hydrolase comprising an amino acid sequence that is at least 70% identical to any one of SEQ ID NOS: 189, 58, 184, 185, 187, 188, 190, and 212;
(D) a cytochrome P450 enzyme comprising an amino acid sequence having at least 70% sequence identity with an amino acid sequence selected from SEQ ID NO: 194 and SEQ ID NO: 171; and
(E) at least one uridine diphosphate dependent glycosyltransferase (UGT) enzyme comprising an amino acid sequence having at least 70% sequence identity to any one of SEQ ID NO: 164, 165, 138, 204 to 211, 213 to 218.

106. The microbial host cell of claim 105, wherein at least one squalene epoxidase comprises an amino acid sequence that is at least 70% identical to any one of SEQ ID NOS: 17 to 39, 168 to 170, and 177 to 183.

107. The microbial host cell of claim 106, wherein at least one squalene epoxidase comprises an amino acid sequence that is at least 70% identical to SEQ ID NO: 39.

108. The microbial host cell of claim 107, wherein the at least one SQE comprises an amino acid sequence that is at least 80%, or at least 85%, or at least 90%, or at least 95%, or at least 98%, or at least 99% identical to SEQ ID NO: 39.

109. The microbial host cell of claim 108, wherein the host cell comprises two squalene epoxidase enzymes that each comprise an amino acid sequence that is at least 70% identical to SEQ ID NO: 39.

110. The microbial host cell of claim 109, wherein one of the SQE enzymes has one or more amino acid modifications that improve specificity or productivity for conversion of 2,3-oxidosqualene to 2,3;22,23 dioxidosqualene, as compared to the enzyme having the amino acid sequence of SEQ ID NO: 39.

111. The microbial host cell of claim 110, wherein the amino acid modifications to the squalene epoxidase comprise one or more modifications at positions corresponding to the following positions of SEQ ID NO: 39: 35, 133, 163, 254, 283, 380, and 395.

112. The microbial host cell of claim 111, wherein the squalene epoxidase comprises the amino acid substitutions: H35R, F163A, M283L, V380L, and F395Y, numbered according to SEQ ID NO: 39; or comprises the amino acid substitutions: H35R, N133G, F163A, Y254F, V380L, and F395Y, numbered according to SEQ ID NO: 39.

113. The microbial host cell of any one of claims 105 to 112, wherein the heterologous enzyme pathway further comprises a squalene synthase (SQS).

114. The microbial host cell of claim 113, wherein the SQS comprises an amino acid sequence that is at least 70% identical to SEQ ID NO: 11; or the SQS comprises an amino acid sequence that is at least 80%, or at least 85%, or at least 90%, or at least 95%, or at least 98%, or at least 99% identical to SEQ ID NO: 11.

115. The microbial host cell of any one of claims 105 to 114, wherein the heterologous enzyme pathway comprises at least one triterpene cyclase (TTC).

116. The microbial host cell of claim 115, wherein the heterologous enzyme pathway comprises at least two enzymes having triterpene cyclase activity and converting 22,23-dioxidosqualene to 24,25-epoxycucurbitadienol.

117. The microbial host cell of claim 115 or 116, wherein the TTC comprises an amino acid sequence that is at least 70% identical to the amino acid sequence of SEQ ID NO. 40; or the TTC comprises an amino acid sequence that is at least 80%, or at least 85%, or at least 90%, or at least 95%, or at least 98%, or at least 99% identical to SEQ ID NO-40.

118. The microbial host cell of any one of claims 115 to 117, wherein the heterologous enzyme pathway comprises at least one TTC that comprises an amino acid sequence that is at least 70% identical to one of SEQ ID NO: 191, SEQ ID NO: 192, SEQ ID NO: 193; or at least one TTC comprises an amino acid sequence that is at least 80%, or at least 85%, or at least 90%, or at least 95%, or at least 98%, or at least 99% identical to one of SEQ ID NOS: 191, 192, and 193.

119. The microbial host cell of any one of claims 105 to 118, wherein the heterologous pathway comprises an enzyme that converts cucurbitadienol to 24,25-epoxycucurbitadienol.

120. The microbial host cell of claim 119, wherein the enzyme converting cucurbitadienol to 24,25-epoxycucurbitadienol comprises an amino acid sequence having at least about 70% sequence identity to SEQ ID NO: 221.

121. The microbial host cell of any one of claims 105 to 120, wherein the heterologous enzyme pathway comprises an epoxide hydrolase (EPH).

122. The microbial host cell of claim 121, wherein the heterologous pathway comprises at least one EPH converting 24,25-epoxycucurbitadienol to 24,25-dihydroxycucurbitadienol, the at least one EPH comprising an amino acid sequence that is at least 70% identical to one of: SEQ ID NO: 189, SEQ ID NO: 58, SEQ ID NO: 184, SEQ ID NO: 185, SEQ ID NO: 187, SEQ ID NO: 188, SEQ ID NO: 190) and SEQ ID NO: 212).

123. The microbial host cell of claim 122, wherein the EPH comprises an amino acid sequence that is at least 80%, or at least 85%, or at least 90%, or at least 95%, or at least 98%, or at least 99% identical to one of SEQ ID NOS: 189, 58, 184, 185, 187, 188, 190, and 212.

124. The microbial host cell of any one of claims 105 to 123, wherein the heterologous pathway comprises one or more oxidases that oxidize C11 of C24,25 dihydroxycucurbitadienol to produce mogrol.

125. The microbial host cell of claim 124, wherein at least one oxidase is a cytochrome P450 enzyme.

126. The microbial host cell of claim 124 or 125, wherein the cytochrome P450 comprises an amino acid sequence that is at least 70% identical to an amino acid sequence selected from SEQ ID NO: 194 and SEQ ID NO: 171; or the cytochrome P450 enzyme comprises an amino acid sequence that is at least 80%, or at least 85%, or at least 90%, or at least 95%, or at least 98%, or at least 99% identical to one of SEQ ID NOS: 194 and 171.

127. The microbial host cell of claim 125 or 126, wherein the cytochrome P450 enzyme has at least a portion of its transmembrane region substituted with a heterologous transmembrane region.

128. The microbial host cell of any one of claims 124 to 127, wherein the microbial host cell expresses one or more electron transfer proteins selected from a cytochrome P450 reductase (CPR), flavodoxin reductase (FPR) and ferredoxin reductase (FDXR) sufficient to regenerate the one or more oxidases.

129. The microbial host cell of claim 128, wherein the microbial host cell expresses SEQ ID NO: 194 or a derivative thereof, and SEQ ID NO: 98) or a derivative thereof.

130. The microbial host cell of claim 129, wherein the microbial host cell expresses SEQ ID NO: 171 or a derivative thereof, and SEQ ID NO: 201 or a derivative thereof.

131. The microbial host cell of any one of claims 105 to 130, wherein the heterologous enzyme pathway comprises one or more uridine diphosphate-dependent glycosyltransferase (UGT) enzymes, thereby producing one or more mogrol glycosides.

132. The microbial host cell of claim 131, wherein the host cell produces one or more mogrol glycosides selected from Mog.II-E, Mog.III, Mog.III-A1, Mog.III-A2, Mog.III, Mog.IV, Mog.IV-A, siamenoside, and Mog V.

133. The microbial host cell of claim 132, wherein the host cell produces Mog.V or siamenoside.

134. The microbial host cell of any one of claims 105 to 133, wherein at least one uridine diphosphate dependent glycosyltransferase (UGT) enzyme comprises an amino acid sequence having at least 70% sequence identity to one of SEQ ID NO: 164, 165, 138, 204 to 211, and 213 to 218.

135. The microbial host cell of claim 134, wherein at least one UGT enzyme comprises an amino acid sequence that is at least 70% identical to Stevia rebaudiana UGT85C1 (SEQ ID NO: 165), or wherein at least one UGT enzyme comprises an amino acid sequence that is at least 80%, or at least 85%, or at least 90%, or at least 95%, or at least 98%, or at least 99% identical to SEQ ID NO: 165.

136. The microbial host cell of claim 135, wherein the UGT enzyme has an amino acid substitution at one or more positions selected from 41, 49, and 127 with respect to SEQ ID NO: 165, optionally including one or more of L41F, D49E, C127F.

137. The microbial host cell of claim 134, wherein at least one UGT enzyme comprises an amino acid sequence that is at least 70% identical to Coffea arabica UGT (SEQ ID NO. 164); or wherein at least one UGT enzyme comprises an amino acid sequence that is at least 80%, or at least 85%, or at least 90%, or at least 95%, or at least 98%, or at least 99% identical to SEQ ID NO: 164.

138. The microbial host cell of claim 137, wherein the UGT enzyme has one or more amino acid substitutions from Table 3 with respect to SEQ ID NO: 164, and which optionally include one or more of S150F, T147L, N207K, K270E, V281L, L354V, L13F, T32A, and K101A.

139. The microbial host cell of claim 134, wherein at least one UGT enzyme comprises an amino acid sequence that is at least 70% identical to SEQ ID NO: 138; or wherein at least one UGT enzyme comprises an amino acid sequence that is at least 80%, or at least 85%, or at least 90%, or at least 95%, or at least 98%, or at least 99% identical to SEQ ID NO: 138.

140. The microbial host cell of claim 134, wherein at least one UGT enzyme comprises an amino acid sequence that is at least 70% identical to SEQ ID NO: 204; or wherein at least one UGT enzyme comprises an amino acid sequence that is at least 80%, or at least 85%, or at least 90%, or at least 95%, or at least 98%, or at least 99% identical to SEQ ID NO: 204.

141. The microbial host cell of claim 134, wherein at least one UGT enzyme comprises an amino acid sequence that is at least 70% identical to SEQ ID NO: 205; or wherein at least one UGT enzyme comprises an amino acid sequence that is at least 80%, or at least 85%, or at least 90%, or at least 95%, or at least 98%, or at least 99% identical to SEQ ID NO: 205.

142. The microbial host cell of claim 134, wherein at least one UGT enzyme comprises an amino acid sequence that is at least 70% identical to SEQ ID NO: 206; or wherein at least one UGT enzyme comprises an amino acid sequence that is at least 80%, or at least 85%, or at least 90%, or at least 95%, or at least 98%, or at least 99% identical to SEQ ID NO: 206.

143. The microbial host cell of claim 134, wherein at least one UGT enzyme comprises an amino acid sequence that is at least 70% identical to SEQ ID NO: 207; or wherein at least one UGT enzyme comprises an amino acid sequence that is at least 80%, or at least 85%, or at least 90%, or at least 95%, or at least 98%, or at least 99% identical to SEQ ID NO: 207.

144. The microbial host cell of claim 134, wherein at least one UGT enzyme comprises an amino acid sequence that is at least 70% identical to SEQ ID NO: 208; or wherein at least one UGT enzyme comprises an amino acid sequence that is at least 80%, or at least 85%, or at least 90%, or at least 95%, or at least 98%, or at least 99% identical to SEQ ID NO: 208.

145. The microbial host cell of claim 134, wherein at least one UGT enzyme comprises an amino acid sequence that is at least 70% identical to SEQ ID NO: 209; or wherein at least one UGT enzyme comprises an amino acid sequence that is at least 80%, or at least 85%, or at least 90%, or at least 95%, or at least 98%, or at least 99% identical to SEQ ID NO: 209.

146. The microbial host cell of claim 134, wherein at least one UGT enzyme comprises an amino acid sequence that is at least 70% identical to SEQ ID NO: 210; or wherein at least one UGT enzyme comprises an amino acid sequence that is at least 80%, or at least 85%, or at least 90%, or at least 95%, or at least 98%, or at least 99% identical to SEQ ID NO: 210.

147. The microbial host cell of claim 134, wherein at least one UGT enzyme comprises an amino acid sequence that is at least 70% identical to SEQ ID NO: 211; or wherein at least one UGT enzyme comprises an amino acid sequence that is at least 80%, or at least 85%, or at least 90%, or at least 95%, or at least 98%, or at least 99% identical to SEQ ID NO. 211.

148. The microbial cell of claim 134, wherein at least one UGT enzyme comprises an amino acid sequence that is at least 70% identical to SEQ ID NO: 213; or wherein at least one UGT enzyme comprises an amino acid sequence that is at least 80%, or at least 85%, or at least 90%, or at least 95%, or at least 98%, or at least 99% identical to SEQ ID NO: 213.

149. The microbial cell of claim 134, wherein at least one UGT enzyme comprises an amino acid sequence that is at least 70% identical to SEQ ID NO: 214; or wherein at least one UGT enzyme comprises an amino acid sequence that is at least 80%, or at least 85%, or at least 90%, or at least 95%, or at least 98%, or at least 99% identical to SEQ ID NO. 214.

150. The microbial cell of claim 134, wherein at least one UGT enzyme comprises an amino acid sequence that is at least 70% identical to SEQ ID NO: 215; or wherein at least one UGT enzyme comprises an amino acid sequence that is at least 80%, or at least 85%, or at least 90%, or at least 95%, or at least 98%, or at least 99% identical to SEQ ID NO: 215.

151. The method of claim 134, wherein at least one UGT enzyme comprises an amino acid sequence that is at least 70% identical to SEQ ID NO: 218; or wherein at least one UGT enzyme comprises an amino acid sequence that is at least 80%, or at least 85%, or at least 90%, or at least 95%, or at least 98%, or at least 99% identical to SEQ ID NO: 218.

152. The method of claim 134, wherein at least one UGT enzyme comprises an amino acid sequence that is at least 70% identical to SEQ ID NO: 217; or wherein at least one UGT enzyme comprises an amino acid sequence that is at least 80%, or at least 85%, or at least 90%, or at least 95%, or at least 98%, or at least 99% identical to SEQ ID NO: 217, the UGT optionally having an amino acid substitution selected from A74E, 191F, H101P, Q241E, and I436L.

153. The method of claim 134, wherein at least one UGT enzyme comprises an amino acid sequence that is at least 70% identical to SEQ ID NO: 216; or wherein at least one UGT enzyme comprises an amino acid sequence that is at least 80%, or at least 85%, or at least 90%, or at least 95%, or at least 98%, or at least 99% identical to SEQ ID NO: 216.

154. The microbial host cell of any one of claims 134 to 153, wherein at least one UGT enzyme further comprises an amino acid sequence that is at least 70% identical to SEQ ID NO: 146); or wherein at least one UGT enzyme comprises an amino acid sequence that is at least 80%, or at least 85%, or at least 90%, or at least 95%, or at least 98%, or at least 99% identical to SEQ ID NO: 146.

155. The microbial cell of any one of claims 134 to 154, wherein at least one UGT enzyme further comprises an amino acid sequence that is at least 70% identical to SEQ ID NO: 202; wherein at least one UGT enzyme comprises an amino acid sequence that is at least 80%, or at least 85%, or at least 90%, or at least 95%, or at least 98%, or at least 99% identical to SEQ ID NO: 202.

156. The microbial host cell of any one of claims 134 to 155, wherein the microbial host cell expresses at least three UGT enzymes: a first UGT enzyme catalyzing primary glycosylation at the C24 hydroxyl of mogrol, a second UGT enzyme catalyzing primary glycosylation at the C3 hydroxyl of mogrol, and a third UGT enzyme catalyzing one or more branching glycosylation reactions.

157. The microbial host cell of claim 156, wherein the microbial host cell expresses one or two UGT enzymes catalyzing beta 1,2 and/or beta 1,6 branching glycosylations of the C3 and/or C24 primary glycosylations.

158. The microbial host cell of claim 157, wherein the UGT enzymes comprise three or four UGT enzymes selected from:
SEQ ID NO: 165 or a derivative thereof;
SEQ ID NO: 146 or a derivative thereof;
SEQ ID NO: 214 or a derivative thereof;
SEQ ID NO: 129 or a derivative thereof;
SEQ ID NO: 164 or a derivative thereof;
SEQ ID NO: 116 or a derivative thereof;
SEQ ID NO: 202 or a derivative thereof;
SEQ ID NO: 218 or a derivative thereof;
SEQ ID NO: 217 or a derivative thereof;
SEQ ID NO: 138 or a derivative thereof;
SEQ ID NO: 204 or a derivative thereof; and
SEQ ID NO: 205 or a derivative thereof;
SEQ ID NO: 207 or a derivative thereof;
SEQ ID NO: 208 or a derivative thereof;
SEQ ID NO: 209 or a derivative thereof;
SEQ ID NO: 11 or a derivative thereof;
SEQ ID NO: 215 or a derivative thereof;
SEQ ID NO: 213 or a derivative thereof;
SEQ ID NO: 206 or a derivative thereof;
SEQ ID NO: 122 or a derivative thereof; and
SEQ ID NO: 210) or a derivative thereof.

159. The microbial host cell of any one of claims 105 to 158, wherein the microbial host cell is prokaryotic or eukaryotic, and is optionally a bacteria selected from Escherichia coli, Bacillus subtilis, Corynebacterium glutamicum, Rhodobacter capsulatus, Rhodobacter sphaeroides, Zymomonas mobilis, Vibrio natriegens, or Pseudomonas putida; or is a yeast selected from a species of Saccharomyces, Pichia, or Yarrowia, and which is optionally Saccharomyces cerevisiae, Pichia pastoris, and Yarrowia lipolytica.

160. The microbial host cell of claim 159, wherein the microbial host cell is E. coli.

161. The microbial host cell of claim 159 or 160, wherein the microbial host cell is a bacterium that produces increased MEP pathway products.

162. The microbial host cell of any one of claims 105 to 161, wherein the heterologous enzyme pathway comprises a farnesyl diphosphate synthase (FPPS).

163. The microbial host cell of any one of claims 105 to 162, wherein microbial host cell has one or more genetic modifications that increase the production or availability of UDP-glucose.

164. The method of claim 163, wherein the microbial host cell is a bacterial cell having one or more genetic modifications selected from ΔgalE, ΔgalT, ΔgalK, ΔgalM, ΔushA, Δagp, Δpgm, duplication or overexpression of E. coli galU, expression of Bacillus subtilis UGPA, and expression of Bifidobacterium adolescentis SPL.

165. A UGT enzyme or host cell expressing the UGT enzyme, the UGT enzyme comprising an amino acid sequence that has at least about 70%, at least about 80%, at least about 85%, at least about 90%, at least about 95%, or at least about 97% sequence identity with SEQ ID NO: 165, and having one or more an amino acid substitutions selected from L41F, D49E, and C127F with respect to SEQ ID NO: 165.

166. The UGT enzyme or host cell of claim 165, wherein the UGT enzyme comprises the amino acid substitutions L41F, D49E, and C127F, with respect to SEQ ID NO: 165.

167. A UGT enzyme or host cell expressing the UGT enzyme, the UGT enzyme comprising an amino acid sequence that has at least about 70%, at least about 80%, at least about 85%, at least about 90%, at least about 95%, or at least about 97% sequence identity with SEQ ID NO: 164, and having one or more an amino acid substitutions selected from Table 3.

168. The UGT enzyme or host cell of claim 167, wherein the UGT enzyme has one or more substitutions selected from S150F, T147L, N207K, K270E, V281L, L354V, L13F, T32A, and K101A, with respect to SEQ ID NO: 164.

169. The UGT enzyme of claim 168, comprising the amino acid substitutions T147L and N207K, with respect to SEQ ID NO: 164.

170. The UGT enzyme or host cell expressing the UGT enzyme, the UGT enzyme comprising an amino acid sequence that has at least about 70%, at least about 80%, at least about 85%, at least about 90%, at least about 95%, or at least about 97% sequence identity with SEQ ID NO: 217, and having one or more an amino acid substitutions selected from A74E, 191F, H101P, Q241E, and I436L, with respect to SEQ ID NO: 217.

171. The UGT enzyme or host cell of claim 170, comprising the amino acid substitutions A74E, I91F, and H101P with respect to SEQ ID NO: 217.

The application's sequence listing, which the Patent Office published only in electronic form, follows.

SEQUENCE LISTING (221 sequences)

SEQ ID NO: 1 - protein, 352 aa, Saccharomyces cerevisiae
MASEKEIRRERFLNVFPKLVEELNASLLAYGMPKEACDWYAHSLNYNTPGGKLNRGLSVVDTYAILSNKTVEQLGQEEYEKVAILGWCIELLQAYFLVADDMMDKSITRRGQPCWYKVPEVGEIAINDAFMLEAAIYKLLKSHFRNEKYYIDITELFHEVTFQTELGQLMDLITAPEDKVDLSKFSLKKHSFIVTFKTAYYSFYLPVALAMYVAGITDEKDLKQARDVLIPLGEYFQIQDDYLDCFGTPEQIGKIGTDIQDNKCSWVINKALELASAEQRKTLDENYGKKDSVAEAKCKKIFNDLKIEQLYHEYEESIAKDLKAKISQVDESRGFKADVLTAFLNKVYKRSK

SEQ ID NO: 2 - protein, 417 aa, Siraitia grosvenorii
MGSLGAILRHPDDFYPLLKLKMAARHAEKQIPPEPHWGFCYTMLHKVSRSFALVIQQLAPELRNAICIFYLVLRALDTVEDDTSIQTDIKVPILKAFHCHIYNRDWHFSCGTKDYKVLMDQFHHVSTAFLELGKGYQEAIEDITKRMGAGMAKFICKEVETVDDYDEYCHYVAGLVGLGLSKLFHASDLEDLAPDSLSNSMGLLLQKTNIIRDYLEDINEIPKSRMFWPREIWGKYADKLEDFKYEENSVKAVQCLNDLVTNALNHVEDCLKYMSNLRDLSIFRFCAIPQIMAIGTLALCYNNVEVFRGVVKMRRGLTAKVIDRTQTMADVYGAFFDFSVMLKAKVNSSDPNATKTLSRIEAIQKTCEQSGLLNKRKLYAVKSEPMFNPTLIVILFSLLCIILAYLSAKRLPANQPV

SEQ ID NO: 3 - protein, 417 aa, Siraitia grosvenorii
MGSLGAILRHPDDFYPLLKLKMAARHAEKQIPPEPHWGFCYTMLHKVSRSFALVIQQLAPELRNAICIFYLVLRALDTVEDDTSIQTDIKVPILKAFHCHIYNRDWHFSCGTKDYKVLMDQFHHVSTAFLELGKGYQEAIEDITKRMGAGMAKFICKEVETVDDYDEYCHYVAGLVGLGLSKLFHASDLEDLAPDSLSNSMGLLLQKTNIIRDYLEDINEIPKSRMFWPREIWGKYADKLEDFKYEENSVKAVQCLNDLVTNALNHVEDCLKYMSNLRDLSIFRFCAIPQIMAIGTLALCYNNVEVFRGVVKMRRGLTAKVIDRTQTMADVYGAFFDFSVMLKAKVNNSDPNATKTLSRIEAIQKTCEQSGLLNKRKLYAVKSEPMFNPTLIVILFSLLCIILAYLSAKRLPANQPV

SEQ ID NO: 4 - protein, 417 aa, Cucumis sativus
MGSLGAILKHPDDFYPLLKLKIAARHAEKQIPPEPHWGFCYTMLHKVSRSFALVIQQLKPELRNAVCIFYLVLRALDTVEDDTSIQTDIKVPILKAFHCHIYNRDWHFSCGTKDYKVLMDEFHHVSTAFLELGKGYQEAIEDITKRMGAGMAKFICKEVETVDDYDEYCHYVAGLVGLGLSKLFHAAELEDLAPDSLSNSMGLFLQKTNIIRDYLEDINEIPKSRMFWPREIWGKYADKLEDFKYEENSVKAVQCLNDLVTNALNHVEDCLKYMSNLRDLSIFRFCAIPQIMAIGTLALCYNNVEVFRGVVKMRRGLTAKVIDRTKTMADVYGAFFDFSVMLKAKVNSNDPNASKTLSRIEAIQKTCKQSGILNRRKLYVVRSEPMFNPAVIVILFSLLCIILAYLSAKRLPANQSV

SEQ ID NO: 5 - protein, 417 aa, Cucumis melo
MGSLGAILKHPDDFYPLLKLKMAARHAEKQIPPESHWGFCYTMLHKVSRSFALVIQQLKPELRNAVCIFYLVLRALDTVEDDTSIQTDIKVPILKAFHCHIYNRDWHFSCGTKDYKVLMDEFHHVSTAFLELGKGYQEAIEDITKRMGAGMAKFICKEVETVDDYDEYCHYVAGLVGLGLSKLFHAAELEDLAPDSLSNSMGLFLQKTNIIRDYLEDINEIPKSRMFWPREIWGKYADKLEDFKYEENSVKAVQCLNDLVTNALNHVEDCLKYMSNLRDLSIFRFCAIPQIMAIGTLALCYNNVEVFRGVVKMRRGLTAKVIDRTKTMADVYGAFFDFSVMLKAKVNSNDPNASKTLSRIEAIQQTCQQSGLMNKRKLYVVRSEPMYNPAVIVILFSLLCIILAYLSAKRLPANQSV

SEQ ID NO: 6 - protein, 417 aa, Cucumis melo
MGSLGAILKHPDDFYPLLKLKMAARHAEKQIPPESHWGFCYTMLHKVSRSFALVIQQLKPELRNAVCIFYLVLRALDTVEDDTSIQTDIKVPILKAFHCHIYNRDWHFSCGTKDYKVLMDEFHHVSTAFLELGKGYQEAIEDITKRMGAGMAKFICKEVETVDDYDEYCHYVAGLVGLGLSKLFHAAELEDLAPDSLSNSMGLFLQKTNIIRDYLEDINEIPKSRMFWPREIWGKYADKLEDFKYEENSVKAVQCLNDLVTNALNHVEDCPKYMSNLRDLSIFRFCAIPQIMAIGTLALCYNNVEVFRGVVKMRRGLTAKVIDRTKTMADVYGAFFDFSVMLKAKVNSNDPNASKTLSRIEAIQQTCQQSGLMNKRKLYVVRSEPMYNPAVIVILFSLLCIILAYLSAKRLPANQSV

SEQ ID NO: 7 - protein, 417 aa, Cucurbita moschata
MGSLGAILRHPDDIYPLLKLKMAARHAEKQIPPESHWGFCYTMLHKVSRSFALVIQQLKPELRNAVCIFYLVLRALDTVEDDTSIQTDIKVPILKAFHCHIYNRDWHFSCGTKDYKVLMDEFHHVSTAFLELGRGYQEAIEDITKRMGAGMAKFICKEVETVEDYDEYCHYVAGLVGLGLSKLFHASKSENLAPDSLSNSMGLFLQKTNIIRDYLEDINEIPKSRMFWPREIWSKYADKLEDFKYEKNSVKAVQCLNDLVTNALTHVEDCLEYMSNLKDLSIFRFCAIPQIMAIGTLALCYNNVDVFRGVVKMRRGLTAKVIYRTKTMADVYGAFFDFSVMLKAKVNSSDPNASKTLTRIEAIQKTCKQSGLLNKRELYAVRSEPMCNPAAIVVLFSLLCIILAYLSAKLLPANQPV

SEQ ID NO: 8 - protein, 417 aa, Sechium edule
MGSLGAILSHPDDLYPLLKLKMAAKHAEKQIPPDPHWGFCFSMLHKVSRSFALVIQQLKPELRNAVCIFYLVLRALDTVEDDTGIHPDIKVPILQAFHCHIYNRDWHFSCGTKHYKVLMDEFHHVSTAFLELGKGYQEAIEDVTERMGAGMAKFICKEVETVDDYDEYCHYVAGLVGLGLSKLFHAAELEDLAPDSLSNSMGLFLQKTNIIRDYLEDINEIPKSRMFWPREIWNKYADKLEDFKYEENSVKAVQCLNDLVTNALNHVEDCLKYMSNLKDLSTFRFCAIPQIMAIGTLALCYDNVEVFRGVVKMRRGLTAKIIDRTKKIADVYGAFFDFSVMLKAKVNSSDPNAAKTLSRIEAIEKTCKESGLLNKRKLYVIRSEPLFNPAVLVILFSLICILLAYLSAKRLPANQPV

SEQ ID NO: 9 - protein, 415 aa, Panax quinquefolius
MGSLGAILKHPDDFYPLLKLKFAARHAEKQIPPEPHWAFCYSMLHKVSRSFGLVIQQLGPQLRDAVCIFYLVLRALDTVEDDTSIPTEVKVPILMAFHRHIYDKDWHFSCGTKEYKVLMDEFHHVSNAFLELGSGYQEAIEDITMRMGAGMAKFICKEVETIDDYDEYCHYVAGLVGLGLSKLFHASGAEDLATDSLSNSMGLFLQKTNIIRDYLEDINEIPKSRMFWPRQIWSKYVDKLEDLKYEENSAKAVQCLNDMVTDALVHAEDCLKYMSDLRDPAIFRFCAIPQIMAIGTLALCFNNTQVFRGVVKMRRGLTAKVIDRTKTMSDVYGAFFDFSCLLKSKVDNNDPNATKTLSRLEAIQKTCKESGTLSKRKSYIIESESGHNSALIAIIFIILAILYAYLSSNLLLNKQ

SEQ ID NO: 10 - protein, 412 aa, Malus domestica
MGALSTMLKHPDDIYPLLKLKIASRQIEKQIPAEPHWAFCYTMLQKVSRSFALVIQQLGTELRNAVCLFYLVLRALDTVEDDTSVATDVKVPILLAFHRHIYDPDWHFACGTNNYKVLMDEFHHVSTAFLELGTGYQEAIEDITKRMGAGMAKFILKEVETIDDYDEYCHYVAGLVGLGLSKLFHAAGKEDLASDSLSNSMGLFLQKTNIIRDYLEDINEIPKSRMFWPRQIWSKYVNKLEDLKYEENSEKAVQCLNDMVTNALIHMEDCLKYMAALRDPAIFKFCAIPQIMAIGTLALCYNNIEVFRGVVKMRRGLTAKVIDRTKSMDDVYGAFFDFSSILKSKVDKNDPNATKTLSRVEAVQKLCRDSGALSKRKSYIANREQSYNSTLIVALFIILAIIYAYLSASPRI

SEQ ID NO: 11 - protein, 418 aa, Artemisia annua
MSSLKAVLKHPDDFYPLLKLKMAAKKAEKQIPSQPHWAFSYSMLHKVSRSFALVIQQLNPQLRDAVCIFYLVLRALDTVEDDTSIAADIKVPILIAFHKHIYNRDWHFACGTKEYKVLMDQFHHVSTAFLELKRGYQEAIEDITMRMGAGMAKFICKEVETVDDYDEYCHYVAGLVGIGLSKLFHSSGTEILFSDSISNSMGLFLQKTNIIRDYLEDINEIPKSRMFWPREIWSKYVNKLEDLKYEENSEKAVQCLNDMVTNALIHIEDCLKYMSQLKDPAIFRFCAIPQIMAIGTLALCYNNIEVFRGVVKLRRGLTAKVIDRTKTMADVYQAFSDFSDMLKSKVDMHDPNAQTTITRLEAAQKICKDSGTLSNRKSYIVKRESSYSAALLALLFTILAILYAYLSANRPNKIKFTL

SEQ ID NO: 12 - protein, 408 aa, Glycine soja
MDQRSEDEFYPLLKLKIVARNAEKQIPPEPHWAFCYTMLHKVSRSFALVIQQLGIELRNAVCIFYLVLRALDTVEDDTSIETDVKVPILIAFHRHIYDRDWHFSCGTKEYKVLMGQFHHVSTAFLELGKNYQEAIEDITKRMGAGMAKFICKEVETIDDYDEYCHYVAGLVGLGLSKLFHASGSEDLAPDDLSNSMGLFLQKTNIIRDYLEDINEIPKSRMFWPRQIWSEYVNKLEDLKYEENSVKAVQCLNDMVTNALMHAEDCLTYMAALRDPPIFRFCAIPQIMAIGTLALCYNNIEVFRGVVKMRRGLTAKVIDRTKTMADVYGAFFDFASMLEPKVDKNDPNATKTLSRLEAIQKTCRESGLLSKRKSYIVNDESGYGSTMIVILVIMVSIIFAYLSANHHNS

SEQ ID NO: 13 - protein, 415 aa, Diospyros kaki
MGSLAAMLRHPDDVYPLVKLKMAARHAEKQIPPEPHWAFCYTMLHKVSRSFGLVIQQLGTELRNAVCIFYLVLRALDTVEDDTSIATEVKVPILLAFHHHIYDRDWHFSCGTREYKVLMDEFHHVSTAFLELGKGYQEAIEDITMRMGAGMAKFICKEVETIDDYDEYCHYVAGLVGLGLSKLFHASGLEDLAPDSLSNSMGLFLQKTNIIRDYLEDINEIPKSRMFWPRQIWSKYVNKLEDLKYEKNSVKSVQCLNDMVTNALIHVDDCLKYMSALRDPAIFRFCAIPQIMAIGTLALCYNNIEVFRGVVKMRRGLTAKVIDQTKTISDVYGAFFDFSCMLKSKVEKNDPNSTKTLSRIEAIQKTCRESGTLSKRKSYILRSKRTHNSTLIFVLFIILAILFAYLSANRPPINM

SEQ ID NO: 14 - protein, 410 aa, Euphorbia lathyris
MGSLGAILKHPDDFYPLLKLKMAAKHAEKQIPAQPHWGFCYSMLHKVSRSFSLVIQQLGTELRDAVCIFYLVLRALDTVEDDTSIPTDVKVPILIAFHKHIYDPEWHFSCGTKEYKVLMDQIHHLSTAFLELGKSYQEAIEDITKKMGAGMAKFICKEVETVDDYDEYCHYVAGLVGLGLSKLFDASGFEDLAPDDLSNSMGLFLQKTNIIRDYLEDINEIPKSRMFWPRQIWSKYVNKLEDLKYEENSVKAVQCLNDMVTNALIHMDDCLKYMSALRDPAIFRFCAIPQIMAIGTLALCYNNVEVFRGVVKMRRGLTAKVIDRTRTMADVYRAFFDFSCMMKSKVDRNDPNAEKTLNRLEAVQKTCKESGLLNKRRSYINESKPYNSTMVILLMIVLAIILAYLSKRAN

SEQ ID NO: 15 - protein, 413 aa, Camellia oleifera
MGSLGAILKHPDDFYPLMKLKMAARRAEKNIPPEPHWGFCYSMLHKVSRSFALVIQQLDTELRNAVCIFYLVLRALDTVEDDTSIATEVKVPILMAFHRHIYDRDWHFSCGTKEYKVLMDEFHHVSTAFSELGRGYQEAIEDITMRMGAGMAKFICKEVETIDDYDEYCHYVAGLVGLGLSKLFHASGSEDLASDSLSNSMGLFLQVFLLTCIKTNIIRDYLEDINEIPKSRMFWPRQIWSKYVNKLEDLKDKENSVKAVECLNDMVTNALIHVEDCLTYMSALRDPSIFRFCAIPQIMAIGTLALCYNNIEVFRGVVKMRRGLTAKVIDRTKTMSDVYGGFFDFSCMLKSKVNKSDPNAMKALSRLEAIQKICRESGTLNKRKSYIIKSEPRYNSTLVFVLFIILAILFAYL

SEQ ID NO: 16 - protein, 414 aa, Eleutherococcus senticosus
MGSLGAILKHPDDFYPLLKLKFAARHAEKQIPPEPHWAFCYSMLHKVSRSFGLVIQQLDAQLRDAVCIFYLVLRALDTVEDDTSIPTEVKVPILMAFHRHIYDKDWHFSCGTKEYKVLMDEFHHVSNAFLELGSGFQEAIEDITMRMGAGMAKFICKEVETIDDYDEYCHYVAGLVGLGLSKLFHASGAEDLATDSLSNSMGLFLQKTNIIRDYLEDINEIPKSRMFWPRQIWSKYVDKLENLKYEENSAKAVQCLNDMVTNALLHAEDCLKYMSNLRDPAIFRFCAIPQIMAIGTLALCFNNIQVFRGVVKMRRGLTAKVIDRTKTMSDVYGAFFDFSCLLKSKVDNNDPNATKTLSRLEAIQKTCKESGTLSKRKSYIIESKSAHNSALIAIIFIILAILYAYLSSNLPNNQ

SEQ ID NO: 17 - protein, 528 aa, Siraitia grosvenorii
MVDQCALGWILASALGLVIALCFFVAPRRNHRGVDSKERDECVQSAATTKGECRFNDRDVDVIVVGAGVAGSALAHTLGKDGRRVHVIERDLTEPDRIVGELLQPGGYLKLIELGLQDCVEEIDAQRVYGYALFKDGKNTRLSYPLENFHSDVSGRSFHNGRFIQRMREKAASLPNVRLEQGTVTSLLEEKGTIKGVQYKSKNGEEKTAYAPLTIVCDGCFSNLRRSLCNPMVDVPSYFVGLVLENCELPFANHGHVILGDPSPILFYQISRTEIRCLVDVPGQKVPSIANGEMEKYLKTVVAPQVPPQIYDSFIAAIDKGNIRTMPNRSMPAAPHPTPGALLMGDAFNMRHPLTGGGMTVALSDIVVLRNLLKPLKDLSDASTLCKYLESFYTLRKPVASTINTLAGALYKVFCASPDQARKEMRQACFDYLSLGGIFSNGPVSLLSGLNPRPLSLVLHFFAVAIYGVGRLLLPFPSVKGIWIGARLIYSASGIIFPIIRAEGVRQMFFPATVPAYYRSPPVFKPIV

SEQ ID NO: 18 - protein, 524 aa, Siraitia grosvenorii
MVDQCALGWILASVLGAAALYFLFGRKNGGVSNERRHESIKNIATTNGEYKSSNSDGDIIIVGAGVAGSALAYTLGKDGRRVHVIERDLTEPDRIVGELLQPGGYLKLTELGLEDCVDDIDAQRVYGYALFKDGKDTRLSYPLEKFHSDVAGRSFHNGRFIQRMREKAASLPKVSLEQGTVTSLLEENGIIKGVQYKTKTGQEMTAYAPLTIVCDGCFSNLRRSLCNPKVDVPSCFVGLVLENCDLPYANHGHVILADPSPILFYRISSTEIRCLVDVPGQKVPSISNGEMANYLKNVVAPQIPSQLYDSFVAAIDKGNIRTMPNRSMPADPYPTPGALLMGDAFNMRHPLTGGGMTVALSDVVVLRDLLKPLRDLNDAPTLSKYLEAFYTLRKPVASTINTLAGALYKVFCASPDQARKEMRQACFDYLSLGGIFSNGPVSLLSGLNPRPISLVLHFFAVAIYGVGRLLIPFPSPKRVWIGARIISGASAIIFPIIKAEGVRQMFFPATVAAYYRAPRVVKGR

SEQ ID NO: 19 - protein, 526 aa, Momordica charantia
MVDECALGWILAAALGAVIALCLFVAPKTNNQDGGVDSKATPECVQTTNGECRSDGDSDVIIVGAGVAGSALAHTLGKDGRRVHVIERDLTEPDRIVGELLQPGGYLKLIELGLADCVEEIDAQRVYGYALFKDGKNTRLSYPLEKFHSDVSGRSFHNGRFIQRMREKADSLPNVRLEQGTVTSLLEEKGTIKGVQYKSKDGKEKTAYAPLTIVCDGCFSNLRRSLCNPMVDVPSCFVGLVLENCQLPFANHGHVVLGDPSPILFYPISSTEIRCLVDVPGQKVPSISNGEMEKYLKTVVAPQVPPQIYDAFIAAIDKGNIRTMPNRSMPAAPHPTPGALLMGDAFNMRHPLTGGGMTVALSDIVVLRNLLKPLKDLHDAPTLCKYLESFYTLRKPVASTINTLAGALYKVFCASPDQARKEMRQACFDYLSLGGMFSNGPVSLLSGLNPRPLSLVLHFFAVAIYGVGRLLFPFPSPKGIWIGARLIYSASGIIFPIIKAEGVRQMFFPATVPAYYRSPPALKPVA

SEQ ID NO: 20 - protein, 529 aa, Cucurbita maxima
MVDYCAFGWILAAVLGLAIALSFFVSPRRNRRGGADSTPRSEGVRSSSTTNGECRSVDGDADVIIVGAGVAGSALAHTLGKDGRLVHVIERDLTEPDRIVGELLQPGGYLKLIELGLQDCVEEIDAQKVYGYALFKDGKNTQLSYPLEKFQSDVSGRSFHNGRFIQRMREKAASLPNVRLEQGTVTSLLEEKGTIKGVQYKSKNGEEKTAYAPLTIVCDGCFSNLRRSLCKPMVDVPSCFVGLVLENCQLPFANHGHVVLGDPSPILFYPISSTEIRCLVDVPGQKIPSISNGEMEKYLKTIVAPQVPPQIHDAFIAAIDKGNIRTMPNRSMPAAPQPTPGALLMGDAFNMRHPLTGGGMTVALSDIVVLRNLLKPLKDLNDAPTLCKYLESFYTLRKPVASTINTLAGALYKVFCASPDQARKEMRQACFDYLSLGGIFSNGPVSLLSGLNPRPLSLVLHFFAVAIYGVGRLLLPFPSPKGIWIGARLVYSASGIIFPIIKAEGVRQMFFPATVPAYYRSPPVHKSIA

SEQ ID NO: 21 - protein, 529 aa, Cucurbita moschata
MVDYCAFGWILAAVLGLAIALSFFVSPRRNRRGGADSTPRSEGVRSSSTTNGECRSVDCDADVIIVGAGVAGSALAHTLGKDGRLVHVIERDLTEPDRIVGELLQPGGYLKLIELGLQDCVEEIDAQKVYGYALFKDGKNTQLSYPLEKFQSDVSGRSFHNGRFIQRMREKAASLPNVRLEQGTVTSLLEEKGTIKGVQYKSKNGEEKTAHAPLTIVCDGCFSNLRRSLCKPMVDVPSCFVGLVLENCQLPFANHGHVVLGDPSPILFYPISSTEIRCLVDVPGQKVPSISNGEMEKYLKTIVAPQVPPQIHDAFIAAIDKGNIRTMPNRSMPAAPQPTPGALLMGDAFNMRHPLTGGGMTVALSDIVVLRNLLKPLKDLNDAPTLCKYLESFYTLRKPVASTINTLAGALYKVFCASPDQARKEMRQACFDYLSLGGIFSNGPVSLLSGLNPRPLSLVLHFFAVAIYGVGRLLLPFPSPKGIWIGARLVYSASGIIFPIIKAEGVRQMFFPATVPAYYRSPPVLKTIA

SEQ ID NO: 22 - protein, 531 aa, Cucurbita moschata
MMVDHCAFAWILDVVLGLVVAVTFFVAAPRRNRRGGTDSTASKDCVISTAIANGECKPDDADAEVIIVGAGVAGSALAYTLGKDGRRVHVIERDLTEPDRIVGEFLQPGGYLKLIELGLGDCVEEIDAQKLYGYALFKDGKNTRVSYPLGNFHSDVSGRSFHNGRFIQRMREKAASLPNVRLEQGTVTSLLETKGTIKGVQYKSKNGEEKTAYAPLTIVCDGCFSNLRRSLCKPMVDVPSCFVGLVLENCQLPFANHGHVVLGDPSPILFYPISSTEIRCLVDVPGQKVPSISNGDMEKYLKTVVAPQVPPQIHDAFIAAIEKGNVRTMPNRSMPAAPHPTPGALLMGDAFNMRHPLTGGGMTVALSDIVVLRNLLKPLKDLNDASTLCKYLESFYTLRKPVASTINTLAGALYKVFCASPDQARKEMRQACFDYLSLGGVFSNGPISLLSGLNPRPSSLVLHFFAVAIYGVGRLLLPFPSLKGIWIGARLIYSASGIILPIIKAEGVRQMFFPATVPAYYRSPPVHKPIT

SEQ ID NO: 23 - protein, 528 aa, Cucumis sativus
MVDHCTFGWIFSAFLAFVIAFSFFLSPRKNRRGRGTNSTPRRDCLSSSATTNGECRSVDGDADVIIVGAGVAGSALAHTLGKDGRRVHVIERDLTEPDRIVGELLQPGGYLKLIELGLQDCVEEIDAQKVYGYALFKDGKSTRLSYPLENFQSDVSGRSFHNGRFIQRMREKAAFLPNVRLEQGTVTSLLEEKGTITGVQYKSKNGEQKTAYAPLTIVCDGCFSNLRRSLCNPMVDVPSCFVGLVLENCQLPYANLGHVVLGDPSPILFYPISSTEIRCLVDVPGQKVPSISNGEMEKYLKTVVAPQVPPQIHDAFIAAIEKGNIRTMPNRSMPAAPQPTPGALLMGDAFNMRHPLTGGGMTVALSDIVVLRNLLKPLKDLNDAPTLCKYLESFYTLRKPVASTINTLAGALYKVFCASSDQARKEMRQACFDYLSLGGIFSNGPVSLLSGLNPRPLSLVLHFFAVAIYGVGRLLLPFPSPKGIWIGARLVYSASGIIFPIIKAEGVRQMFFPATVPAYYRTPPVFNS

SEQ ID NO: 24 - protein, 528 aa, Cucumis melo
MVDHCAFGWIFSALLAFPIALSLFLSPWRNRRVRGTDSTPRSASVSSSATTNGECRSVDGDADVVIVGAGVAGSALAHTLGKDGRRVHVIERDLTEPDRIVGELLQPGGYLKLIELGLQDCVEEIDAQKVYGYALFKDGKNTRLSYPLENFHSDVSGRSFHNGRFIQRMREKAASLPNVRLEQGTVTSLLEEKGTITGVQYKSKNGEQKTAYAPLTIVCDGCFSNLRRSLCTPMVDVPSYFVGLVLENCQLPYANLGHVVLGDPSPILFYPISSTEIRCLVDVPGQKVPSISNGEMEKYLKTVVAPQVPPQIHDAFIAAIEKGNIRTMPNRSMPAAPQPTPGALLMGDAFNMRHPLTGGGMTVALSDIVVLRNLLKPLKDLNDAPTLCKYLESFYTLRKPVASTINTLAGALYKVFCASPDQARKEMRQACFDYLSLGGIFSNGPVSLLSGLNPRPLSLVLHFFAVAIYGVGRLLLPFPSLKGIWIGARLVYSASGIIFPIIKAEGVRQMFFPATVPAYYRTPPVLNS

SEQ ID NO: 25 - protein, 533 aa, Cucurbita maxima
MMVEHCAYGWILAAVLGLVVAVTFFVAVPRRNRRGGTDSTASKDCVISPAIANGECEPEDADADADVIIVGAGVAGSALAHTLGKDGRRVHVIERDLTEPDRIVGEFLQPGGHLKLIELGLGDCVEEIDAQKLYGYALFKDGKNTRVSYPLGNFHSDVSGRSFHNGRFIQRMREKAASLPNVRLEQGTVTSLLEKKGTIKGVQYKSKNGEEKTAYAPLTIVCDGCFSNLRRSLCKPMVDVPSCFVGLVLENCRLPFANHGHVVLGDPSPILFYPISSTEIRCLVDVPGQKVPSIPNGDMEKYLKTVVAPQVPPQIHDAFIAAIEKGNIRTMPNRSMPAAPHPTPGALLMGDAFNMRHPLTGGGMTVALSDIVVLRNLLKPLKDLNDAPTLCKYLESYYTLRKPVASTINTLAGALYKVFCASPDQARKEMRQACFDYLSLGGVFSNGPISLLSGLNPRPSCLVLHFFAVAIYGVGRLLLPFPSLKGIWIGARLIYSASGIILPIIKAEGVRQMFFPATVPAYYRSPPVHKPIT

SEQ ID NO: 26 - protein, 522 aa, Ziziphus jujube
MLDQCPLGWILASVLGLFVLCNLIVKNRNSKASLEKRSECVKSIATTNGECRSKSDDVDVIIVGAGVAGSALAHTLGKDGRRLHVIERDLTEPDRIVGELLQPGGYLKLIELGLQDCVEEIDAQRVFGYALFKDGKDTRLSYPLEKFHSDVSGRSFHNGRFIQRMREKSASLPNVRLEQGTVTSLLEEKGTIKGVQYKTKTGQELTAFAPLTIVCDGCFSNLRRSLCNPKVDVPSCFVGLVLENCELPYANHGHVILADPSPILFYPISSTEVRCLVDVPGQKVPSISNGEMAKYLKSVVAPQIPPQIYDAFIAAVDKGNIRTMPNRSMPASPFPTPGALLMGDAFNMRHPLTGGGMTVALSDIVVLRDLLKPLGDLNDAATLCKYLESFYTLRKPVASTINTLAGALYKVFCASPDQARKEMRQACFDYLSLGGIFSTGPVSLLSGLNPRPLSLVLHFFAVAIYGVGRLLLPFPSPKRIWIGARLISGASGIIFPIIKAEGVRQMFFPATVPAYYRAAPVE

SEQ ID NO: 27 - protein, 524 aa, Morus alba
MADPYTMGWILASLLGLFALYYLFVNNKNHREASLQESGSECVKSVAPVKGECRSKNGDADVIIVGAGVAGSALAHTLGKDGRRVHVIERDLAEPDRIVGELLQPGGYLKLIELGLQDCVEEIDSQRVYGYALFKDGKDTRLSYPLEKFHSDVSGRSFHNGRFIQRMREKAASLPNVQLEQGTVTSLLEENGTIKGVQYKTKTGQELTAYAPLTIVCDGCFSNLRRSLCIPKVDVPSCFVGLVLENCNLPYANHGHVVLADPSPILFYPISSTEVRCLVDVPGQKVPSISNGEMAKYLKTVVASQIPPQIYDSFVAAVDKGNIRTMPNRSMPAAPHPTPGALLMGDAFNMRHPLTGGGMTVALSDIVVLRDLLKPLRDLNDSVTLCKYLESFYTLRKPVASTINTLAGALYKVFCASPDQARKEMREACFDYLSLGGVFSEGPVSLLSGLNPRPLSLVCHFFAVAIYGVGRLLLPFPSPKRLWIGARLISGASGIIFPIIRAEGVRQMFFPATIPAYYRAPRPN

SEQ ID NO: 28 - protein, 527 aa, Juglans regia
MVDPYALGWSFASVLMGLVALYILVDKKNRSRVSSEARSEGVESVTTTTSGECRLTDGDADVIIVGAGVAGSALAHTLGKDGRRVHVIERDLTEPDRIVGELLQPGGYLKLIELGLEDCVEDIDAQRVFGYALFKDGKNTRLSYPLEKFHSDVSGRSFHNGRFIQRMREKAASLLNVRLEQGTVTSLLEENGTVKGVQYKTKDGNELTAHAPLTIVCDGCFSNLRRSLCNPQVDVPSSFVGLVLENCELPYANHGHVILADPSPILFYPISSTEVRCLVDVPGKKVPSIANGEMEKYLKNMVAPQLPPEIYDSFVAAVDRGNIRTMPNRSMPAAPHPTPGALLMGDAFNMRHPLTGGGMTVALSDIVVLRDLLKPLRDLNDAPTLCKYLESFYTLRKPVASTINTLAGALYKVFCASPDRARKEMRQACFDYLSLGGVFSMGPVSLLSGLNPRPLSLVLHFFAVAVYGVGRLLVPFPSPSRIWIGARLISGASAIIFPIIKAEGVRQMFFPATVPAYYRAPPVKRDH

SEQ ID NO: 29 - protein, 524 aa, Cucumis melo
MVDQCALGWILASVLGASALYLLFGKKNCGVLNERRRESLKNIATTNGECKSSNSDGDIIIVGAGVAGSALAYTLAKDGRQVHVIERDLSEPDRIVGELLQPGGYLKLTELGLEDCVDDIDAQRVYGYALFKDGKDTRLSYPLEKFHSDVSGRSFHNGRFIQRMREKAASLPNVRLEQGTVTSLLEENGTIKGVQYKNKSGQEMTAYAPLTIVCDGCFSNLRRSLCNPKVDVPSCFVGLILENCDLPYANHGHVILADPSPILFYPISSTEIRCLVDVPGQKVPSISNGEMANYLKNVVAPQIPPQLYNSFIAAIDKGNIRTMPNRSMPADPYPTPGALLMGDAFNMRHPLTGGGMTVALSDIVVLRDLLKPLRDLNDAPTLCKYLEAFYTLRKPVASTINTLAGALYKVFCASPDQARKEMRQACFDYLSLGGIFSNGPVSLLSGLNPRPLSLVLHFFAVAIYGVGRLLIPFPSPKRVWIGARLISGASAIIFPIIKAEGVRQMFFPKTVAAYYRAPPVVRER

SEQ ID NO: 30 - protein, 524 aa, Cucumis sativus
MVDQCALGWILASVLGASALYLLFGKKNCGVSNERRRESLKNIATTNGECKSSNSDGDIIIVGAGVAGSALAYTLAKDGRQVHVIERDLSEPDRIVGELLQPGGYLKLTELGLEDCVDEIDAQRVYGYALFKDGKDTRLSYPLEKFHSDVSGRSFHNGRFIQRMREKAASLPNVRLEQGTVTSLLEENGTIRGVQYKNKSGQEMTAYAPLTIVCDGCFSNLRRSLCNPKVDVPSCFVGLILENCDLPHANHGHVILADPSPILFYPISSTEIRCLVDVPGQKVPSISNGEMANYLKNVVAPQIPPQLYNSFIAAIDKGNIRTMPNRSMPADPYPTPGALLMGDAFNMRHPLTGGGMTVALSDIVVLRDLLKPLRDLNDAPTLCKYLEAFYTLRKPVASTINTLAGALYKVFCASPDQARKEMRQACFDYLSLGGIFSNGPVSLLSGLNPRPLSLVLHFFAVAIYGVGRLLIPFPSPKRVWIGARLISGASAIIFPIIKAEGVRQMFFPKTVAAYYRAPPIVRER

SEQ ID NO: 31 - protein, 537 aa, Juglans regia
MVDQYALGLILASVLGFVVLYNLMAKKNRIRVSSEARTEGVQTVITTTNGECRSIEGDVDVIIVGAGVAGSALAHTLGKDGRKVHVIERDLSEPDRIVGELLQPGGYLKLVELGLQDSVEDIDAQRVFGYALFKDGKNTRLSYPLEKFHSDVSGRSFHNGRFIQRMREKAASLPNIRLEQGTVTSLLEENGTIKGVQYKTKDGKELAAHAPLTIVCDGCFSNLRRSLCNPQVDVPSSFVGLVLENCELPYANHGHVVLADPSPILFYPISSTEVRCLVDVPGQKVPSISNGEMAKYLKTMVAPQVPPEIYDSFVAAVDRGNIRTMPNRSMPAAPQPTPGALLMGDAFNMRHPLTGGGMTVALSDIVVLRDLLRPLRDLNDAPTLCKYLESFYTLRKPVASTINTLAGALYKVFCASPDRARNEMRQACFDYLSLGGVFSTGPVSLLSGLNPRPLSLVLHFFAVAVYGVGRLLVPFPSPSRMWIGARLISGASAIIFPIIKAEGVRQMFFPATVPAYYRAPPVNCQARSLKPDALKGL

SEQ ID NO: 32 - protein, 523 aa, Theobroma cacao
MADSYVWGWILGSVMTLVALCGVVLKRRKGSGISATRTESVKCVSSINGKCRSADGSDADVIIVGAGVAGSALAHTLGKDGRRVHVIERDLTEPDRIVGELLQPGGYLKLIELGLEDCVEEIDAQQVFGYALFKDGKHTRLSYPLEKFHSDVSGRSFHNGRFIQRMREKSASLPNVRLEQGTVTSLLEEKGTIRGVQYKTKDGRELTAFAPLTIVCDGCFSNLRRSLCNPKVDVPSCFVGLVLENCNLPYSNHGHVILADPSPILFYPISSTEVRCLVDVPGQKVPSIANGEMANYLKTIVAPQVPPEIYNSFVAAVDKGNIRTMPNRSMPAAPYPTPGALLMGDAFNMRHPLTGGGMTVALSDIVVLRDLLRPLRDLNDAPTLCKYLESFYTLRKPIASTINTLAGALYKVFCASPDQARKEMRQACFDYLSLGGVFSTGPISLLSGLNPRPVSLVLHFFAVAIYGVGRLLLPFPSPKRIWIGARLISGASGIIFPIIKAEGVRQMFFPATVPAYYRAPPVE

SEQ ID NO: 33 - protein, 531 aa, Cucurbita moschata; identical to SEQ ID NO: 22

SEQ ID NO: 34 - protein, 525 aa, Phaseolus vulgaris
MLDTYVFGWIICAALSVFVIRNFVFAGKKCCASSETDASMCAENITTAAGECRSSMRDGEFDVLIVGAGVAGSALAYTLGKDGRQVLVIERDLSEPDRIVGELLQPGGYLKLIELGLEDCVDKIDAQQVFGYALFKDGKHIRLSYPLEKFHSDVAGRSFHNGRFIQRMREKAASLPNVRLEQGTVTSLLEEKGVIKGVQYKTKDSQELSVCAPFTIVCDGCFSNLRRSLCDPKVDVPSCFVGLVLENCELPCANHGHVILGEPSPVLFYPISSTEIRCLVDVPGQKVPSISNGEMAKYLKTVIAPQVPHELHNAFIAAVDKGSIRTMPNRSMPAAPYPTPGALLMGDAFNMRHPLTGGGMTVALSDIVVLRNLLRPLRDLNDAPSLCKYLESFYTLRKPVASTINTLAGALYKVFCASSDPARKEMRQACFDYLSLGGQFSEGPISLLSGLNPRPLTLVLHFFAVATYGVGRLLLPFPSPKRMWIGLRLISSASGIIMPIIKAEGVRQMFFPATVPAYYRNPPAA

SEQ ID NO: 35 - protein, 533 aa, Hevea brasiliensis
MKMADHYLLGWILASVMGLFAFYYIVYLLVKPEEDNNRRSLPQPRSDFVKTMTATNGECRSDDDSDVDVIIVGAGVAGAALAHTLGKDGRRVHVIERDLTEPDRIVGELLQPGGYLKLIELGLEDCVEEIDAQRVFGYALFKDGKHTQLAYPLEKFHSEVAGRSFHNGRFIQRMREKAASLPSVKLEQGTVTSLLEEKGTIKGVLYKTKTGEELTAFAPLTIVCDGCFSNLRRSLCNPKVDVPSCFVGLVLENCRLPYANNGHVILADPSPILFYPISSTEVRSLVDVPGQKVPSVSSGEMANYLKNVVAPQVPPEIYDSFVAAVDKGNIRTMPNRSMPASPYPTPGALLMGDAFNMRHPLTGGGMTVALSDIVVLRDLLKPLRDLHDAPTLCRYLESFYTLRKPVASTINTLAGALYKVFCASPDEARKEMRQACFDYLSLGGVFSTGPVSLLSGLNPRPLSLVLHFFAVAIYGVGRLLLPFPSPHRIWVGARLISGASGIIFPIIKAEGVRQMFFPATVPAYYRAPPIKCN

SEQ ID NO: 36 - protein, 529 aa, Sorghum bicolor
MAAAAAAASGVGFQLIGAAAATLLAAVLVAAVLGRRRRRARPQAPLVEAKPAPEGGCAVGDGRTDVIIVGAGVAGSALAYTLGKDGRRVHVIERDLTEPDRIVGELLQPGGYLKLIELGLEDCVEEIDAQRVLGYALFKDGRNTKLAYPLEKFHSDVAGRSFHNGRFIQRMRQKAASLPNVQLEQGTVTSLLEENGTVKGVQYKTKSGEELKAYAPLTIVCDGCFSNLRRALCSPKVDVPSCFVGLVLENCQLPHPNHGHVILANPSPILFYPISSTEVRCLVDVPGQKVPSIASGEMANYLKTVVAPQIPPEIYDSFIAAIDKGSIRTMPNRSMPAAPHPTPGALLMGDAFNMRHPLTGGGMTVALSDIVVLRNLLKPLHNLHDASSLCKYLESFYTLRKPVASTINTLAGALYKVFSASPDQARNEMRQACFDYLSLGGVFSNGPIALLSGLNPRPLSLVAHFFAVAIYGVGRLMLPLPSPKRMWIGARLISGACGIILPIIKAEGVRQMFFPATVPAYYRAAPMGE

SEQ ID NO: 37 - protein, 484 aa, Zea mays
MRKNLEEAGCAVSDGGTDVIIVGAGVAGSALAYTLGKDGRRVHVIERDLTEPDRIVGELLQPGGYLKLIELGLQDCVEEIDAQRVLGYALFKDGRNTKLAYPLEKFHSDVAGRSFHNGRFIQRMRQKAASLPNVQLEQGTVTSLLEENGTVKGVQYKTKSGEELKAYAPLTIVCDGCFSNLRRALCSPKVDVPSCFVGLVLENCQLPHPNHGHVILANPSPILFYPISSTEVRCLVDVPGQKVPSIATGEMANYLKTVVAPQIPPEIYDSFIAAIDKGSIRTMPNRSMPAAPHPTPGALLMGDAFNMRHPLTGGGMTVALSDIVVLRNLLKPLRNLHDASSLCKYLESFYTLRKPVASTINTLAGALYKVFSASPDQARNEMRQACFDYLSLGGVFSNGPIALLSGLNPRPLSLVAHFFAVAIYGVGRLMLPLPSPKRMWIGARLISGACGIILPIIKAEGVRQMFFPATVPAYYRAAPTGEKA

SEQ ID NO: 38 - protein, 524 aa, Medicago sativa
MDLYNIGWILSSVLSLFALYNLIFSGKRNYHDVNDKVKDSVTSTDAGDIQSEKLNGDADVIIVGAGIAGAALAHTLGKDGRRVHIIERDLSEPDRIVGELLQPGGYLKLVELGLQDCVDNIDAQRVFGYALFKDGKHTRLSYPLEKFHSDVSGRSFHNGRFIQRMREKAASLPNVNMEQGTVISLLEEKGTIKGVQYKNKDGQALTAYAPLTIVCDGCFSNLRRSLCNPKVDNPSCFVGLILENCELPCANHGHVILGDPSPILFYPISSTEIRCLVDVPGTKVPSISNGDMTKYLKTTVAPQVPPELYDAFIAAVDKGNIRTMPNRSMPADPRPTPGAVLMGDAFNMRHPLTGGGMTVALSDIVVLRNLLKPMRDLNDAPTLCKYLESFYTLRKPVASTINTLAGALYKVFSASPDEARKEMRQACFDYLSLGGLFSEGPISLLSGLNPRPLSLVLHFFAVAVFGVGRLLLPFPSPKRVWIGARLLSGASGIILPIIKAEGIRQMFFPATVPAYYRAPPVNAF

SEQ ID NO: 39 - protein, 437 aa, Methylomonas lenta
MKEEFDICIIGAGMAGATISAYLAPKGIKIALIDHCYKEKKRIVGELLQPGAVLSLEQMGLSHLLDGFEAQTVKGYALLQGNEKTTIPYPSQHEGIGLHNGRFLQQIRASALENSSVTQIHGKALQLLENERNEIIGVSYRESITSQIKSIYAPLTITSDGFFSNFRAHLSNNQKTVTSYFIGLILKDCEMPFPKHGHVFLSGPTPFICYPISDNEVRLLIDFPGEQLPRKNLLQEHLDTNVTPYIPECMRSSYAQAIQEGGFKVMPNHYMAAKPIVRKGAVMLGDALNMRHPLTGGGLTAVFSDIQILSAHLLAMPDFKNTDLIHEKIEAYYRDRKRANANLNILANALYAVMSNDLLKTAVFKYLQCGGANAQESIAVLAGLNRKHFSLIKQFCFLAVFGACNLLQQSISNIPKALKLLKDAFVIIKPLIKNELS

SEQ ID NO: 40 - protein, 759 aa, Siraitia grosvenorii
MWRLKVGAESVGENDEKWLKSISNHLGRQVWEFCPDAGTQQQLLQVHKARKAFHDDRFHRKQSSDLFITIQYGKEVENGGKTAGVKLKEGEEVRKEAVESSLERALSFYSSIQTSDGNWASDLGGPMFLLPGLVIALYVTGVLNSVLSKHHRQEMCRYVYNHQNEDGGWGLHIEGPSTMFGSALNYVALRLLGEDANAGAMPKARAWILDHGGATGITSWGKLWLSVLGVYEWSGNNPLPPEFWLFPYFLPFHPGRMWCHCRMVYLPMSYLYGKRFVGPITPIVLSLRKELYAVPYHEIDWNKSRNTCAKEDLYYPHPKMQDILWGSLHHVYEPLFTRWPAKRLREKALQTAMQHIHYEDENTRYICLGPVNKVLNLLCCWVEDPYSDAFKLHLQRVHDYLWVAEDGMKMQGYNGSQLWDTAFSIQAIVSTKLVDNYGPTLRKAHDFVKSSQIQQDCPGDPNVWYRHIHKGAWPFSTRDHGWLISDCTAEGLKAALMLSKLPSETVGESLERNRLCDAVNVLLSLQNDNGGFASYELTRSYPWLELINPAETFGDIVIDYPYVECTSATMEALTLFKKLHPGHRTKEIDTAIVRAANFLENMQRTDGSWYGCWGVCFTYAGWFGIKGLVAAGRTYNNCLAIRKACDFLLSKELPGGGWGESYLSCQNKVYTNLEGNRPHLVNTAWVLMALIEAGQAERDPTPLHRAARLLINSQLENGDFPQQEIMGVFNKNCMITYAAYRNIFPIWALGEYCHRVLTE

SEQ ID NO: 41 - protein, 762 aa, Momordica charantia
MWRLKVGAESVGENDEKWVKSISNHLGRQVWEFCPDAGTPQQLLQIEKARKAFQDNRFHRKQTSDLLVSIQCEKGTTNGARVPGTKLKEGEEVRKEAVKSTLERALSFYSSIQTSDGNWASDLGGPMFLLPGLVIALCVTGALNSVLSKHHRQEMCRYLYNHQNEDGGWGLHIESPSTMFGSALNYVALRLLGEDADGGEGRAMTKARAWILGHGGATAITSWGKLWLSVLGVYEWSGNNPLPPEFWLLPYFLPFHPGRMWCHCRMVYLPMSYLYGKRFVGPITPVVLSLRKELYTVPYHEIDWNKSRNTCAKEDLYYPHSKMQDILWGSIHHMYEPLFTHWPAKRLREKALKTAMQHIHYEDENTRYICLGPVNKVLNMLCCWVEDPYSEAFKLHLQRVHDYLWVAEDGMKMQGYNGSQLWDTAFSVQAIISTKLVDNYGPTLRKAHDYVKNSQIQQDCPGEPNVWFRHIHKGAWPFSTRDHGWLISDCTAEGLKASLMLSKLPSETVGEPLERNRLCDAVNVLLSLQNDNGGFASYELTRSYPWLELINPAETFGDIVIDYPYVECTSATMEALALFKKLHPGHRTKEIDTAIARAADFLENMQRTDGSWYGCWGVCFTYAGWFGIKGLVAAGRAYSNCLAIRKACDFLLSKELPGGGWGESYLSCQNKVYTNLEGNRPHLVNTAWVLMALIEAGQGERDPAPLHRAARLLINSQLENGDFPQEEIMGVFNKNCMITYAAYRNIFPIWALGEYCHRVLTE

SEQ ID NO: 42 - protein, 764 aa, Cucurbita maxima
MWRLKVGAESVGEKDEKWVKSVSNHLGRQVWEFCADAAADTPHQLLQIQNARNHFHHNRFHRKQSSDLFLAIQYEKEIAKGAKGGAVKVKEGEEVGKEAVKSTLERALGFYSAVQTSDGNWASDLGGPMFLLPGLVIALHVTGVLNSVLSKHHRVEMCRYLYNHQNEDGGWGLHIEGTSTMFGSALNYVALRLLGEDADGGDGGAMTKARAWILERGGATAITSWGKLWLSVLGVYEWSGNNPLPPEFWLLPYSLPFHPGRMWCHCRMVYLPMSYLYGKRFVGPITPKVLSLRQELYTIPYHEIDWNKSRNTCAKEDLYYPHPKMQDILWGSIYHVYEPLFTRWPGKRLREKALQAAMKHIHYEDENSRYICLGPVNKVLNMLCCWVEDPYSDAFKLHLQRVHDYLWVAEDGMRMQGYNGSQLWDTAFSIQAIVATKLVDSYAPTLRKAHDFVKDSQIQEDCPGDPNVWFRHIHKGAWPFSTRDHGWLISDCTAEGLKASLMLSKLPSTMVGEPLEKNRLCDAVNVLLSLQNDNGGFASYELTRSYPWLELINPAETFGDIVIDYPYVECTAATMEALTLFKKLHPGHRTKEIDTAIGKAANFLEKMQRADGSWYGCWGVCFTYAGWFGIKGLVAAGRTYNSCLAIRKACEFLLSKELPGGGWGESYLSCQNKVYTNLEGNKPHLVNTAWVLMALIEAGQGERDPAPLHRAARLLMNSQLENGDFVQQEIMGVFNKNCMITYAAYRNIFPIWALGEYCHRVLTE

SEQ ID NO: 43 - protein, 764 aa, Citrullus colocynthis
MWRLKVGAESVGEKEEKWLKSISNHLGRQVWEFCADQPTASPNHLQQIDNARKHFRNNRFHRKQSSDLFLAIQNEKEIANGTKGGGIKVKEEEDVRKETVKNTVERALSFYSAIQTNDGNWASDLGGPMFLLPGLVIALYVTGVLNSVLSKHHRQEMCRYLYNHQNEDGGWGLHIEGTSTMFGSALNYVALRLLGEDADGGEGGAMTKARGWILDRGGATAITSWGKLWLSVLGVYEWSGNNPLPPEFWLLPYCLPFHPGRMWCHCRMVYLPMSYLYGKRFVGPITPIVLSLRKELYTIPYHEIDWNKSRNTCAKEDLYYPHPKMQDILWGSIYHLYEPLFTRWPGKRLREKALQMAMKHIHYEDENSRYICLGPVNKVLNMLCCWVEDPYSDAFKFHLQRVPDYLWIAEDGMRMQGYNGSQLWDTAFSVQAIISTKLIDSFGTTLKKAHDFVKDSQIQQDFPGDPNVWFRHIHKGAWPFSTRDHGWLISDCTAEGLKASLMLSKLPSKIVGEPLEKSRLCDAVNVLLSLQNENGGFASYELTRSYPWLELINPAETFGDIVIDYPYVECTSATMEALTLFKKLHPGHRTKEIDTAVAKAANFLENMQRTDGSWYGCWGVCFTYAGWFGIKGLVAAGRTYSTCVAIRKACDFLLSKELPGGGWGESYLSCQNKVYTNLEGNRPHLVNTAWVLMALIEAGQAERDPAPLHRAARLLINSQLENGDFPQEEIMGVFNKNCMITYAAYRNIFPIWALGEYFHRVLTE

SEQ ID NO: 44 - protein, 764 aa, Citrullus colocynthis
MWRLKVGAESVGEKEEKWLKSISNHLGRQVWEFCAHQPTASPNHLQQIDNARNHFRNNRFHRKQSSDLFLAIQNEKEIANVTKGGGIKVKEEEDVRKETVKNTVERALSFYSAIQTNDGNWASDLGGPMFLLPGLVIALYVTGVLNSVLSKHHRQEMCRYLYNHQNEDGGWGLHIEGTSTMFGSALNYVALRLLGEDADGGEGGAMTKARSWILDRGGATAITSWGKLWLSVLGVYEWSGNNPLPPEFWLLPYCLPFHPGRMWCHCRMVYLPMSYLYGKRFVGPITPIVLSLRKELYTIPYHEIDWNRSRNTCAKEDLYYPHPKMQDILWGSIYHLYEPLFTRWPGKRLREKALQMAMKHIHYEDENSRYICLGPVNKVLNMLCCWVEDPYSDAFKFHLQRVPDYLWVAEDGMRMQGYNGSQLWDTAFSVQAIISTKLIDSFGTTLKKAHDFVKDSQIQQDCPGDPNVWFRHIHKGAWPFSTRDHGWLISDCTAEGLKASLMLSKLPSKIVGEPLEKSRLCDAVNVLLSLQNENGGFASYELTRSYPWLELINPAETFGDIVIDYPYVECTSATMEALTLFKKLHPGHRTKEIDIAVARAANFLENMQRTDGSWYGCWGVCFTYAGWFGIKGLVAAGRTYNSCVAIRKACDFLLSKELPGGGWGESYLSCQNKVYTNLEGNRPHLVNTAWVLMALIEAGQAERDPAPLHRAARLLINSQLENGDFPQEEIMGVFNKNCMITYAAYRNIFPIWALGEYFHRVLTE

SEQ ID NO: 45 - protein, 765 aa, Cucurbita moschata
MWRLKVGAESVGEKDEKWVKSVSNHLGRQVWEFCADAAAAATPRQLLQIQNARNHFHRNRFHRKQSSDLFLAIQYEKEIAEGGKGGAVKVKEEEEVGKEAVKSTLERALSFYSAVQTSDGNWASDLGGPMFLLPGLVIALYVTGVLNSVLSKHHRVEMCRYLYNHQNEDGGWGLHIEGTSTMFGSALNYVALRLLGEDADGGDDGAMTKARAWILERGGATAITSWGKLWLSVLGVYEWSGNNPLPPEFWLLPYSLPFHPGRMWCHCRMVYLPMSYLYGKRFVGPITPKVLSLRQELYTVPYHEIDWNKSRNTCAKEDLYYPHPKMQDILWGSIYHVYEPLFTRWPGKRLREKALQTAMKHIHYEDENSRYICLGPVNKVLNMLCCWVEDPYSDAFKLHLQRVHDYLWVAEDGMRMQGYNGSQLWDTAFSIQAIVATKLVDSFAPTLRKAHDFVKDSQIQEDCPGDPNVWFRHIHKGAWPFSTRDHGWLISDCTAEGLKASLMLSKLPSTMVGEPLEKNRLCDAVNVLLSLQNDNGGFASYELTRSYPWLELINPAETFGDIVIDYPYVECTAATMEALTLFKKLHPGHRTKEIDTAVGKAANFLEKMQRADGSWYGCWGVCFTYAGWFGIKGLVAAGRTYNSCLAIRKACEFLLSKELPGGGWGESYLSCQNKVYTNLEGNKPHLVNTAWVLMALIEAGQGERDPAPLHRAARLLMNSQLENGDFVQQEIMGVFNKNCMITYAAYRNIFPIWALGEYCHRVLTE

SEQ ID NO: 46 - protein, 785 aa, Cucumis sativus
MWRLKVGKESVGEKEEKWIKSISNHLGRQVWEFCAENDDDDDDEAVIHVVANSSKHLLQQQRRQSSFENARKQFRNNRFHRKQSSDLFLTIQYEKEIARNGAKNGGNTKVKEGEDVKKEAVNNTLERALSFYSAIQTSDGNWASDLGGPMFLLPGLVIALYVTGVLNSVLSKHHRQEMCRYIYNHQNEDGGWGLHIEGSSTMFGSALNYVALRLLGEDANGGECGAMTKARSWILERGGATAITSWGKLWLSVLGVYEWSGNNPLPPEFWLLPYSLPFHPGRMWCHCRMVYLPMSYLYGKRFVGPITHMVLSLRKELYTIPYHEIDWNRSRNTCAQEDLYYPHPKMQDILWGSIYHVYEPLFNGWPGRRLREKAMKIAMEHIHYEDENSRYIYLGPVNKVLNMLCCWVEDPYSDAFKFHLQRIPDYLWLAEDGMRMQGYNGSQLWDTAFSIQAILSTKLIDTFGSTLRKAHHFVKHSQIQEDCPGDPNVWFRHIHKGAWPFSTRDHGWLISDCTAEGLKASLMLSKLPSKIVGEPLEKNRLCDAVNVLLSLQNENGGFASYELTRSYPWLELINPAETFGDIVIDYSYVECTSATMEALALFKKLHPGHRTKEIDAALAKAANFLENMQRTDGSWYGCWGVCFTYAGWFGIKGLVAAGRTYNNCVAIRKACHFLLSKELPGGGWGESYLSCQNKVYTNLEGNRPHLVNTAWVLMALIEAGQGERDPAPLHRAARLLINSQLENGDFPQQEIMGVFNKNCMITYAAYRNIFPIWALGEYSHRVLTE

SEQ ID NO: 47 - protein, 774 aa, Cucumis melo
MWRLKVGKESVGEKEEKWIKSISNHLGRQVWEFCSGENENDDDEAIAVANNSASKFENARNHFRNNRFHRKQSSDLFLAIQCEKEIIRNGAKNEGTTKVKEGEDVKKEAVKNTLERALSFYSAVQTSDGNWASDLGGPMFLLPGLVIALYVTGVLNSVLSKHHRQEMCRYIYNHQNEDGGWGLHIEGSSTMFGSALNYVALRLLGEAADGGEHGAMTKARSWILERGGATAITSWGKLWLSVLGVYEWSGNNPLPPEFWLLPYSLPFHPGRMWCHCRMVYLPMSYLYGKRFVGPITPIVLSLRKELYTIPYHEIDWNRSRNTCAKEDLYYPHPKMQDILWGSIYHVYEPLFSGWPGKRLREKAMKIAMEHIHYEDENSRYICLGPVNKVLNMLCCWVEDPYSDAFKFHLQRIPDYLWLAEDGMRMQGYNGSQLWDTAFSIQAIISTKLIDTFGPTLRKAHHFVKHSQIQEDCPGDPNVWFRHIHKGAWPFSTRDHGWLISDCTAEGLKASLMLSKLPSKIVGEPLEKNRLCDAVNVLLSLQNENGGFASYELTRSYPWLELINPAETFGDIVIDYSYVECTSATMEALALFKKLHPGHRTKEIDAAIAKAANFLENMQKTDGSWYGCWGVCFTYAGWFGIKGLVAAGRTYNNCVAIRKACNFLLSKELPGGGWGESYLSCQNKVYTNLEGNKPHLVNTAWVMMALIEAGQGERDPAPLHRAARLLINSQLESGDFPQQEIMGVFNKNCMITYAAYRNIFPIWALGEYSHRVLDM

SEQ ID NO: 48 - protein, 647 aa, Citrullus lanatus subsp. vulgaris
DGNWASDLGGPMFLLPGLVIALYVTGVLNSVLSKHHRQEMCRYLYNHQNEDGGWGLHIEGTSTMFGSALNYVALRLLGEDADGGEGGAMTKARSWILDRGGATAITSWGKLWLSVLGVYEWSGNNPLPPEFWLLPYCLPFHPGRMWCHCRMVYLPMSYLYGKRFVGPITPIVLSLRKELYTIPYHEIDWNRSRNTCAKEDLYYPHPKMQDILWGSIYHLYEPLFTRWPGKRLREKALQMAMKHIHYEDENSRYICLGPVNKVLNMLCCWVEDPYSDAFKFHLQRVPDYLWVAEDGMRMQGYNGSQLWDTAFSVQAIISTKLIDSFGTTLKKAHDFVKDSQIQQDCPGDPNVWFRHIHKGAWPFSTRDHGWLISDCTAEGLKASLMLSKLPSEIVGEPLEKSRLCDAVNVLLSLQNENGGFASYELTRSYPWLELINPAETFGDIVIDYPYVECTSATMEALTLFKKLHPGRRTKEIDIAVARAANFLENMQRTDGSWYGCWGVCFTYAGWFGIKGLVAAGRTYNSCVAIRKACDFLLSKELPGGGWGESYLSCQNKVYTNLEGNRPHLVNTAWVLMALIEAGQAERDPAPLHRAARLLINSQLENGDFPQEEIMGVFNKNCMITYAAYRNIFPIWALGEYFHRVLTE

SEQ ID NO: 49 - protein, 761 aa, Theobroma cacao
MWRLKIGKESVGDNGAWLRSSNDHVGRQVWEFCPESGTPEELSKVEMARQSFSTDRLLKKHSSDLLMRIQYAKENQFVTNFPQVKLKEFEDVKEEATLTTLRRALNFYSTIQADDGHWPGDYGGPMFLLPGLVITLSVTGALNAVLSKEHQYEMCRYLYNHQNRDGGWGLHIEGPSTMFGTVLNYVTLRLLGEGPEGGQGAVEKACEWILEHGSATAITSWGKMWLSVLGAYEWSGNNPLPPEVWLCPYFLPIHPGRMWCHCRMVYLPMSYLYGKRFVGPITPIILSLRKELYAVPYHEVDWNKARNTCAKEDLYYPHPLVQDILWASLHYLYEPIFTRWPCKSLREKALRTVMQHIHYEDENTRYICIGPVNKVLNMLSCWVEDPYSESFKLHLPRILDYLWIAEDGMKMQGYNGSQLWDTAFAVQAIISTGLADEYGPILRKAHDFIKYSQVLEDCPGDLNFWYRHISKGAWPFSTVDHGWPISDCTSEGLKAVLLLSTLPSESVGEPLHMMRLYDAVNVILSLQNVDGGFPTYELTRSYQWLELINPAETFGDIVIDYPYVECTSAAIQALISFKKLFPEHRMEEIENCIGRAVEFIEKIQAADGSWYGSWGVCFTYAGWFGIKGLSAAGRTYNNSSNIRKACDFLLSKELATGGWGESYLSCQNKVYTNLEGARPHIVNTSWALLALIEAGQAERDPTPLHRAARILINSQMEDGDFPQEEIMGVFNKNCMISYSAYRNIFPIWALGEYTCRVLRAP

SEQ ID NO: 50 - protein, 763 aa, Ziziphus jujube
MWKLKIGAETVGEGGSDGWLRSVNSHLGRQVWEFHPELGTPEELRQIQDARDAFFNHRFHKQHSSDLLMRIQFAKENPCVANPPQVKVKDTDEVTEESVTTTLRRAINFYSTIQAHDGHWAGDYGGPMFLLPGLVITLSVTGALNAVLSKEHQCEMCRYIYNHQNEDGGWGLHIEGPSTMFGTVLNYVSLRLLGEGAEDGLGTIENARKWILDHGGATAITSWGKMWLSVLGVYEWSGNNPLPPEVWLCPYTLPFHPGRMWCHCRMVYLPMSYLYGKRFVGPITPTIRSLRKELYTAPYHEIDWNRARNECAKEDLYYPHPLVQDVLWASLHYVYEPIFMRWPAKKLREKALSTVMQHIHYEDENTRYICIGPVNKVLNMLCCWVEDPNSEAFKLHLPRISDYLWIAEDGMKMQGYNGSQLWDTAFAVQAIVSTDLAEEYGPTIRKAHEYIKNSQVLEDCPGDLNFWYRHISKGAWPFSTADHGWPISDCTAEGLKAVLLLSQLSSETVGDSLDVKRLFNAVNVILSLQNGDGGFATYELTRSYQWLELINPAETFGDIVIDYPYVECTSAALEALTLFKKSYPGHRREEVENCITNAAMFIENIQAKDGSWYGSWGVCFTYAGWFGIKGLVASGRTYENCPSIRKACDFLLSKELPSGGWGESYLSCQNKVYTNLKDNKPHIVNTAWAMLALIVARQAERDPMPLHRAARILIKSQMHDGDFPQEEIMGVFNKNCMISYAAYRNIFPIWALGEYRLHVLRSL

SEQ ID NO: 51 - protein, 762 aa, Prunus avium
MWKLKIGAETVGEGGYQWLKSVNNHLGRQVWEFNPELGSPEELQRIEDARKAFWDNRFERRHSSDLLMRIQFEKENQCVTNLPQLKVKYEEEVTEEVVKTTLRRAISFYSTIQAHDGHWPGDYGGPMFLLPGLVITLSITGALNDVLSKEHQHEMCRYLYNHQNKDGGWGLHIEGPSTMFGTALNYVTLRLFGEGADDGEGAMELARKWILDHGGVTKITSWGKMWLSVLGTYEWSGNNPLPPEVWLCPYSLPFHPGRMWCHCRMVYLPMSYLYGKRFVGPITPTIRSLRKELYGVPYHEVDWNQARNLCAKEDLYYPHPMVQDILWASLHYVYEPVFTRWPAKKLRENALQTVMQHIHYEDENTRYICIGPVNKVLNMLCCWAEDPNSDAFKLHLPRIPDYLWVAEDGMKMQGYNGSQSWDTSFAVQAIISTNLAEEFGPTLRKAHEYIKDSQVLEDCPGDLNFWYRHISKGAWPFSTADHGWPISDCTAEGLKAVLLLSKLPTGTVGESLDMKQLYDAVNVMLSLQNEDGGFATYELTRSYQWLELINPAETFGDIVIDYPYVECTSAAIQALTMFRKLYPGHRREEIESCIARAAKFIEKIQATDGSWYGSWGVCFTYAGWFGIKGLAAAGRTYKDCSSIRKACDFLLSKELPSGGWGESYLSCQNKVYTNLKDNRPHIVHTAWAMLALIGAGQAKRDPTPLHRAARVLINSQMENGDFPQKEIMGVFNKNCMISYSAYRNIFPIWALGEYRCQVLEAL

SEQ ID NO: 52 - protein, 759 aa, Brassica napus
MWKLKIAEGGSPWLRTTNNHVGRQFWEFDPNLGTPEELAAVEEARKSFRENRFAKKHSSDLLMRLQFSRESLSRPVLPQVNIKDGDDVTEKMVETTLKRGVDFYSTIQASDGHWAGDYGGPMFLLPGLIITLSITGALNTVLSEQHKAEMRRYLHNHQNEDGGWGLHIEGPSTMFGSVLNYVTLRLLGEGPNDGDGAMEKGRDWILNHGGATNITSWGKMWLSVLGAFEWSGNNPLPPEIWLLPYILPIHPGRMWCHCRMVYLPMSYLYGKRFVGPITSTVLSLRKELFTVPYHEVDWNEARNLCAKEDLYYPHPLVQDILWASLHKIVEPVLTRWPGSNLREKALRTTLEHIHYEDENTRYICIGPVNKVLNMLCCWVEDPNSEAFKLHLPRIHDYLWVAEDGMKMQGYNGSQLWDTSFAVQAVLATNFVEEYGPVLKKAHSYVKNSQVSEDCPGDLSYWYRHISKGAWPFSTADHGWPISDCTAEGLKAALLLSKVPKEIVGEPVDTKRLYDAVNVIISLQNADGGFATYELTRSYPWLELINPAETFGDIVIDYPYVECTSAAIQALIAFRKLYPGHRKKEVDECIEKAVKFIESIQESDGSWYGSWAVCFTYGTWFGVKGLEAAGKTLKNSPTVAKACEFLLSKQLPSGGWGESYLSCQDKVYSNLDGNRSHVVNTAWALLSLIGAGQVEVDQKPLHRAARYLINAQMESGDFPQQEIMGVFNRNCMITYAAYRNIFPIWALGEYRSKVLLQQGE

SEQ ID NO: 53 - protein, 756 aa, Spinacia oleracea
MWKLKIAEGGSPWLRTTNNHVGRQIWEFDPNLGTPEQIREVEEARENFWKNRFEQKHSSDLLMRMQFAQENSSNVVLPQVKVKDEDEITEETVATTLRRALSYQSTIQAHDGHWPGDYGGPMFLMPGLVIALSVTGALNAVLSKEHQKEMCRYLYNHQNKDGGWGLHIEGHSTMFGTVLTYVTLRLLGEGVDDGDGAMERGRKWTLEHGSATAITSWGKMWLSVLGVFEWAGNNPMPPETWLLPYILPVHPGRMWCHCRMVYLPMSYLYGKRFVGPITPTVLSLRRELFDVPYHEIDWDRARNECAKEDLYYPHPLVQDILWASLHKAVEPILMRWPGKKLREKALSTVMEHIHYEDENTRYICIGPVNKVLNMLCCWVEDPNSEAFKLHLPRIPDFLWIAEDGMKMQGYNGSQLWDTTFMVQAILATNLGEEYGGTLRKAHNFIKDSQVREDCPGDLSYWYRHISKGAWPFSTADHGWPISDCTAEGLKAALLLSKVPSDIVGEPLEVKRLYDSVNVLLSLQNGDGGFATYELTRSYPWLELINPAETFGDIVIDYPYVECTSAAIQALVSFKRLYPGHRREEIENCIKKAAKFIEDIQAADGSWYGSWAVCFTYATWFGIKGLVAAGKNYDNCPAIRKACDFLLSKQLSNGGWGESYLSCQNKVYSNIEGNKAHVVNTGWAMLALIGAGQAKRDPMPLHRAAKVLINSQMPNGDFPQQEIMGVFNRNCMITYAAYRNIFPTWALGEYRTQVLQK

SEQ ID NO: 54 - protein, 756 aa, Trigonella foenum-graecum
  misc_feature (425)..(425): Xaa can be any naturally occurring amino acid
MWKLKVAEGGSPWLRTVNNYVGRQVWEFDPNSGSPQELDQIESVRQNFHNNRFSHKHSDDLLMRIQLAKENPMGEVIPKVRVKDVEDVNEESVTTTLRRALNFYSTLQSRDGHWPGDYGGPMFLMPGLVIALSITGALNAVLTDEHQKEMRRYLYNHQNKDGGWGLHIEGPSTMFGSVLCYVTLRLLGEGPNDGEGEMEKARDWILEHGGATYITSWGKMWLSVLGVFEWSGNNPLPPEIWLLPYMLPIHPGRMWCHCRMVYLPMSYLYGKRFVGPITPTVLSLRKELFTVPYHDIDWNQARNLCAKEDLYYPHPLVQDILWASLHKFVEPIFMNWPGKKLREKAVETVMEHVHYEDENTRYICIGPVNKVLNMLCCWVEDPNSEAFKLHLPRIHDFLWIAEDGMKMQGYNGSQLWDTAFAVQAXISTNLIDEFAPTLRKAHTFIKNSQVLEDCPGDLSKWYRHISKGAWPFSTADHGWPISDCTAEGLKAVLLLSKIGPEIVGEPLDAKGFYDAVNVIISLQNEDGGLATYELTRSYKWLEIINPAETFGDIVIDYTYVECTSAAIQALSTFRKLYPGHRREEIQHCIEKAAAFIEKIQASDGSWYGSWGVCFTYGTWFGVKGLIAAGKSFSNCLSIRKACDFLLSKQLPSGGWGESYLSCQNKVYSNLESNRSHVVNTGWAMLALIEAEQAKRDPTPLHHAAVCLINSQMENGDFPQEEIMGVFNKNCMITYAAYRNIFPIWALGEYRRHVLQA

SEQ ID NO: 55 - protein, 759 aa, Ricinus communis
MWKLRIAEGSGNPWLRTTNDHIGRQVWEFDSSKIGSPEELSQIENARQNFTKNRFIHKHSSDLLMRIQFSKENPICEVLPQVKVKESEQVTEEKVKITLRRALNYYSSIQADDGHWPGDYGGPMFLMPGLIIALSITGALNAILSEEHKREMCRYLYNHQNRDGGWGLHIEGPSTMFGSVLCYVSLRLLGEGPNEGEGAVERGRNWILKHGGATAITSWGKMWLSVLGAYEWSGNNPLPPEMWLLPYILPVHPGRMWCHCRMVYLPMSYLYGKRFVGPITPTVLSLRKELYTVPYHEIDWNQARNQCAKEDLYYPHPMLQDVLWATLHKFVEPILMHWPGKRLREKAIQTAIEHIHYEDENTRYICIGPVNKVLNMLCCWVEDPNSEAFKLHLPRLYDYLWLAEDGMKMQGYNGSQLWDTAFAVQAIVSTNLIEEYGPTLKKAHSFIKKMQVLENCPGDLNFWYRHISKGAWPFSTADHGWPISDCTAEGIKALMLLSKIPSEIVGEGLNANRLYDAVNVVLSLQNGDGGFPTYELSRSYSWLEFINPAETFGDIVIDYPYVECTSAAIQALTSFRKSYPEHQREEIECCIKKAAKFMEKIQISDGSWYGSWGVCFTYGTWFGIKGLVAAGKSFGNCSSIRKACDFLLSKQCPSGGWGESYLSCQKKVYSNLEGDRSHVVNTAWAMLSLIDAGQAERDPTPLHRAARYLINAQMENGDFPQQEIMGVFNRNCMITYAAYRDIFPIWALGEYRCRVLKAS

SEQ ID NO: 56 - protein, 313 aa, Siraitia grosvenorii EPH1
MEKIEHSTIATNGINMHVASAGSGPAVLFLHGFPELWYSWRHQLLYLSSLGYRAIAPDLRGFGDTDAPPSPSSYTAHHIVGDLVGLLDQLGVDQVFLVGDWGAMMAWYFCLFRPDRVKALVNLSVHFTPRNPAISPLDGFRLMLGDDFYVCKFQEPGVAEADFGSVDTATMFKKFLTMRDPRPPIIPNGFRSLATPEALPSWLTEEDIDYFAAKFAKTGFTGGFNYYRAIDLTWELTAPWSGSEIKVPTKFIVGDLDLVYHFPGVKEYIHGGGFKKDVPFLEEVVVMEGAAHFINQEKADEINSLIYDFIKQF

SEQ ID NO: 57 - protein, 316 aa, Siraitia grosvenorii EPH2
MEKIEHTTISTNGINMHVASIGSGPAVLFLHGFPELWYSWRHQLLFLSSMGYRAIAPDLRGFGDTDAPPSPSSYTAHHIVGDLVGLLDQLGIDQVFLVGHDWGAMMAWYFCLFRPDRVKALVNLSVHFLRRHPSIKFVDGFRALLGDDFYFCQFQEPGVAEADFGSVDVATMLKKFLTMRDPRPPMIPKEKGFRALETPDPLPAWLTEEDIDYFAGKFRKTGFTGGFNYYRAFNLTWELTAPWSGSEIKVAAKFIVGDLDLVYHFPGAKEYIHGGGFKKDVPLLEEVVVVDGAAHFINQERPAEISSLIYDFIKKF

SEQ ID NO: 58 - protein, 316 aa, Siraitia grosvenorii EPH3
MDQIEHITINTNGIKMHIASVGTGPVVLLLHGFPELWYSWRHQLLYLSSVGYRAIAPDLRGYGDTDSPASPTSYTALHIVGDLVGALDELGIEKVFLVGHDWGAIIAWYFCLFRPDRIKALVNLSVQFIPRNPAIPFIEGFRTAFGDDFYMCRFQVPGEAEEDFASIDTAQLFKTSLCNRSSAPPCLPKEIGFRAIPPPENLPSWLTEEDINYYAAKFKQTGFTGALNYYRAFDLTWELTAPWTGAQIQVPVKFIVGDSDLTYHFPGAKEYIHNGGFKKDVPLLEEVVVVKDACHFINQERPQEINAHIHDFINKF

SEQ ID NO: 59 - protein, 314 aa, Momordica charantia
MEKIEHSTIAANGITIHVASVGSGPAVLLLHGFPELWYSWRHQLLFLASKGYRAIAPDLRGFGDSDAPPSPSSYTPLHIVGDLVALLDHLGIDLVFLVGHDWGAMMAWHFCLLRPDRVKALVNLSVHFMPRNPAMSPLDGMRLLLGDDFYVCRFQEPGAAEADFGSVDTATMMKKFLTMRDPRPPIIPNGFRSLETPQALPPWLTEEDIDYFAAKFAKTGFTGGFNYYRAIGRTWELTAPWTGSKIKVPAKFIVGDLDMVYHLPDAKEYIHGGGFKEDVPLLEEVVVIEGAAHFINQEKPDEISSLIYDFIKKF

SEQ ID NO: 60 - protein, 314 aa, Cucurbita moschata
MEKIEHSTIATNGINMHVASIGSGPPVLFLHGFPELWYSWRHQLLFLASKGFRAIAPDLRGFGDSDVPPSPSSYTPFHIIGDLIGLLDHLGIEQVFLVGHDWGAMMAWYFCLFRPDRVKALVNLSVHYNPRNPAISPLSRTRQFLGDDFYICKFQTPGVAEADFGSVDTATMMKKFLTIRDPSPPIIPNGFKTLKTPETLPSWLTEEDIDYFASKFTKTGFTGGFNYYRAIEQTWELTGPWSGAKIKVPTKYVVGDVDMVYHLPGAKQYIHGGGFKKDVPLLEEVVVMEGAAHFINQEKADEISAHIYDFIIKF

SEQ ID NO: 61 - protein, 316 aa, Cucurbita maxima
MENIEHTIVPTNGINMHIASIGSGPAVLFLHGFPELWYSWRHQLLFLASNGFRAIAPDLRGFGDTDVPPSPSSYTAHHIVGDLIGLLDHLGIDRVFLVGHDWGAMMAWYFCLFRPDRVRALVNLSVHYLHRHPSIKFVDGFRAFLGDDFYFCQFQEPGVAEADFGSVDTATMLKKFLTMRDPRPPMIPKEKGFRALETPDPLPSWLTEEDVDYFASKFSKTGFTGGFNYYRAFDLSWELTAPWSGSQVKVPAKFIVGDLDLVYHFPGAKEYIHGGRFKEDVPFLEEVVVIEGAAHFINQERADEISSLIYEFINKF

SEQ ID NO: 62 - protein, 316 aa, Prunus persica
MEKIEHTTVSTNGINMHIASIGTGPVVLFLHGFPELWYSWRHQLLSLSSLGYRCIAPDLRGFGDTDAPPSPASYSALHIVGDLIGLLDHLGIDQVFLVGHDWGAVIAWWFCLFRPDRVKALVNMSVAFSPRNPKRKPVDGFRALFGDDYYICRFQEPGEIEKEFAGYDTTSIMKKFLTGRSPKPPCLPKELGLRAWKTPETLPPWLSEEDLNYFASKFSKTGFVGGLNYYRALNLTWELTGPWTGLQVKVPVKFIVGDLDITYHIPGVKNYIHNGGFKRDVPFLQEVVVIEDGAHFINQERPDEISRHVYDFIQKF

SEQ ID NO: 63 - protein, 316 aa, Morus notabilis
MEKIEHSTVHTNGINMHVASVGTGPAILFLHGFPELWYSWRHQMISLSSLGYRCIAPDLRGYGDTDAPPSPTSYTSLHIVGDLVGLIDHLVIEKLFLVGHDWGAMIAWYFCLFRPDRIKALVNLSVPFFPRNPKINFVDGFRAELGDDFYICRFQEPGESEADFSSDTVAVFRRILANRDPKPPLIPKEIGFRGVYEDPVALPSWLTEDDINHFANKFNETGFTGGLNYYRALNLTWELTAAWTGARVQVPTKFIMGDLDLVYYFPGMKEYILNGGFKRDVPLLQELVIIEGAAHFINQEKPDEISSHIHHFIQKF

SEQ ID NO: 64 - protein, 316 aa, Ricinus communis
MEKIEHTTVATNGINMHVAAIGTGPEILFLHGFPELWYSWRHQLLSLSSRGYRCIAPDLRGYGDTDAPESLTGYTALHIVGDLIGLLDSMGIEQVFLVGHDWGAMMAWYLCMFRPDRIKALVNTSVAYMSRNPQLKSLELFRTVYGDDYYVCRFQEPGGAEEDFAQVDTAKLIRSVFTSRDPNPPIVPKEIGFRSLPDPPSLPSWLSEEDVNYYADKFNKKGFTGGLNYYRNIDQNWELTAPWDGLQIKVPVKFVIGDLDLTYHFPGIKDYIHNGGFKQVVPLLQEVVVMEGVAHFINQEKPEEISEHIYDFIKKF

SEQ ID NO: 65 - protein, 316 aa, Citrus unshiu
MEKIEHTTVGTNGINMHVASIGTGPVVLFIHGFPELWYSWRNQLLYLSSRGYRAIAPDLRGYGDTDAPPSVTSYTALHLVGDLIGLLDKLGIHQVFLVGHDWGALIAWYFCLFRPDRVKALVNMSVPFPPRNPAVRPLNNFRAVYGDDYYICRFQEPGEIEEEFAQIDTARLMKKFLCLRIAKPLCIPKDTGLSTVPDPSALPSWLSEEDVNYYASKFNQKGFTGPVNYYRCSDLNWELMAPWTGVQLEVPVKFIVGDQDLVYNNKGMKEYIHNGGFKKYVPYLQEVVVMEGVAHFINQEKAEEVGAHIYEFIKKF

SEQ ID NO: 66 - protein, 316 aa, Hevea brasiliensis
MEKIEHITVFTNGINMHIASIGTGPEILFLHGFPELWYSWRHQLLSLSSLGYRCIAPDLRGYGDTDAPQSVNQYTVLHIVGDLVGLLDSLGIQQVFLVGHDWGAFIAWYFCIFRPDRIKALVNTSVAFMPRNPQVKPLDGLRSMFGDDYYICQFQKPGKAEEDFAQVNTAKLIKLLFTSRDPRPPHFLKEVGLKALQDPPSQQSWLTEEDVNFYAAKFNQKGFRGGLNYYQNINMNWELAAAWTGVQIKVPVKFIIGDLDLTYHFPGIKEYIHNGGFKKDVPLLQDVVVMEGVAHFLNQEKPEEVSKHIYDFIKKF

SEQ ID NO: 67 - protein, 317 aa, Handroanthus impetiginosus
MDKIQHKIIQTNGINIHVAEIGDGPAVLFLHGFPELWYSWRHQMLFLSSRGYRAIAPDLRGYGDSDAPPCATSYTAFHIIGDLVGLLDAMGLDRVFLVGHDWGAVMAWYFCLLRPDRIKALVNLSVVFQPRNPKRKPVESMRAKLGDDYYICRFQEPGEAEEEFARVDTARLIKKLLTTRNPAPPRLPKEVGFGCLPHKPITMPSWLSEEDVQYYAAKFNQKGFTGGLNYYRAMDLSWELAAPWTGVQIKVPVKFIVGDLDITYNTPGVKEYIHKGRFKQHVPFLQELVILEGVAHFLNQEKPDEINQHIYDFIHKF

SEQ ID NO: 68 - protein, 324 aa, Camelina sativa
MEKIEHTTVSTNGINMHVASIGSGPVILFLHGFPDLWYSWRHQLLSFAALGYRAIAPDLRGYGDSDAPPSPESYTILHIVGDLVGLLDSLGVDRVFLVGHDWGAIVAWWLCMIRPDRVKALVNTSVVFNPRNPSVKPVDKFRDLFGDDYYVCRFQETGEIEEDFAQVDTKKLITRFFVSRNPRPPCIPKSVGFRGLPDPPSLPAWLTEQDVSFYGDKFSQKGFTGGLNYYRAMNLSWELTAPWAGLQIKVPVKFIVGDLDITYNIPGTKEYIHGGGLKKHVPFLQEVVVMEGVGHFLQQEKPDEVTDHIYGFFEKFRTRETSSL

SEQ ID NO: 69 - protein, 317 aa, Coffea canephora
MDKIQHRQVPVNGINLHVAEIGDGPAILFLHGFPELWYSWRHQLLSLSAKGYRALAPDLRGYGDSDAPPSPSNYTALHIVGDLVGLLDSLGLDRVFLVGHDWGAVMAWYFCLLRPDRIKALVNMSVVFTPRNPKRKPLEAMRARFGDDYYICRFQEPGEAEEEFARVDTARIIKKFLTSRRPGPLCVPKEVGFGGSPHNPIQLPSWLSEDDVNYFASKFSQKGFTGGLNYYRAMDLNWELTAPWTGLQIKVPVKFIVGDLDVTFTTPGVKEYIQKGGFKRDVPFLQELVVMEGVAHFVNQEKPEEVSAHIYDFIQKF

SEQ ID NO: 70 - protein, 318 aa, Punica granatum
MEKIQHTTVRTNGINMHVATAGSGPDSILFVHGFPELWYTWRHQMVSLAALGYRTIAPDLRGYGDTDAPPSHESYTAFHIVGDLVGLLDSMGIEKVFLVGHDWGAAIAWYFCLFRPDRIKALVNMSVVFHPRNPNRKPVDGLRAILGDDYYICRFQAPGEIEEDFARADTANIIKFFLVSRNPRPPQIPKEGFSCLANSRQMDLPSWLSEEDINYYASKFSEKGFTGGLNYYRVMNLNWELTAPFTGLQIKVPAKFMVGDLDITYNTPGTKEFIHNGGLKKHVPFLQEVVVMEGVAHFINQEKPEEVTAHIYDFIKKF

SEQ ID NO: 71 - protein, 324 aa, Arabidopsis lyrata subsp. lyrata
MEKIEHTTVSTNGINMHVASIGSGPVILFLHGFPDLWYSWRHQLLSFAALGYRAIAPDLRGYGDSDAPPSRESYTILHIVGDLVGLLNSLGVDRVFLVGHDWGAIVAWWLCMIRPDRVNALVNTSVVFNPRNPSVKPVDAFRALFGDDYYICRFQEPGEIEEDFAQVDTKKLITRFFISRNPRPPCIPKSVGFRGLPDPPSLPAWLTEEDVSFYGDKFSQKGFTGGLNYYRALNLSWELTAPWAGLQIKVPVKFIVGDLDITYNIPGTKEYIHEGGLKKHVPFLQEVVVLEGVGHFLHQEKPDEITDHIYGFFKKFRTRETASL

SEQ ID NO: 72 - protein, 316 aa, Rhinolophus sinicus
MDKIEHTTVSTNGINMHVASIGSGPVILFLHGFPDLWYSWRHQLLSFAGLGYRAIAPDLRGYGDSDSPPSHESYTILHIVGDLVGLLDSLGVDRVFLVGHDWGAVVAWWLCMIRPDRVNALVNTSVVFNPRNPSVKPVDAFKALFGEDYYVCRFQEPGEIEEDFAQVDTKKLINRFFTSRNPRPPCIPKTLGFRGLPDPPALPAWLTEQDVSFYADKFSQKGFTGGLNYYRAMNLSWELTAPWAGLQIKVPVKFIVGDLDITYNIPGTKEYIHEGGLKKHVPFLQEVVVMEGVGHFLHQEKPDEVTDHIYGFFKKF

SEQ ID NO: 73 - protein, 473 aa, Siraitia grosvenorii CYP87D18
MWTVVLGLATLFVAYYIHWINKWRDSKFNGVLPPGTMGLPLIGETIQLSRPSDSLDVHPFIQKKVERYGPIFKTCLAGRPVVVSADAEFNNYIMLQEGRAVEMWYLDTLSKFFGLDTEWLKALGLIHKYIRSITLNHFGAEALRERFLPFIEASSMEALHSWSTQPSVEVKNASALMVFRTSVNKMFGEDAKKLSGNIPGKFTKLLGGFLSLPLNFPGTTYHKCLKDMKEIQKKLREVVDDRLANVGPDVEDFLGQAFKDKESEKFISEEFIIQLLFSISFASFESISTTLTLILKLLDEHPEVVKELEVEHEAIRKARADPDGPITWEEYKSMTFTLQVINETLRLGSVTPALLRKTVKDLQVKGKIIPEGWTIMLVTASRHRDPKVYKDPHIFNPWRWKDLDSITIQKNFMPFGGGLRHCAGAEYSKVYLCTFLHILCTKYRWTKLGGGTIARAHILSFEDGLHVKFTPKE

SEQ ID NO: 74 - protein, 474 aa, Cucumis melo
MWTILLGLATLAIAYYIHWVNKWKDSKFNGVLPPGTMGLPLIGETIQLSRPSDSLDVHPFIQSKVKRYGPIFKTCLAGRPVVVSTDAEFNHYIMLQEGRAVEMWYLDTLSKFFGLDTEWLKALGLIHKYIRSITLNHFGAESLRERFLPRIEESARETLHYWSTQPSVEVKESAAAMVFRTSIVKMFSEDSSKLLTAGLTKKFTGLLGGFLTLPLNVPGTTYHKCIKDMKEIQKKLKDILEERLAKGVSIDEDFLGQAIKDKESQQFISEEFIIQLLFSISFASFESISTTLTLILNFLADHPDVAKELEAEHEAIRKARADPDGPITWEEYKSMNFTLNVICETLRLGSVTPALLRKTTKEIQIKGYTIPEGWTVMLVTASRHRDPEVYKDPDTFNPWRWKELDSITIQRNFMPFGGGLRHCAGAEYSKVYLCTFLHILFTKYRWRKLKGGKIARAHILRFEDGLYVNFTPKE

SEQ ID NO: 75 - protein, 474 aa, Cucurbita maxima
MWTIVVGLATLAVAYYIHWINKWKDSKFNGVLPPGTMGLPLIGETLQLSRPSDSLDVHPFIKKKVKRYGSIFKTCLAGRPVVVSTDAEFNNYIMLQEGRAVEMWYLDTLSKFFGLDTEWLKALGFIHKYIRSITLNHFGAESLRERFLPRIEESAKETLCYWATQPSVEVKDSAAVMVFRTSMVKMVSKDSSKLLTGGLTKKFTGLLGGFLTLPINVPGTTYNKCMKDMKEIQKKLREILEGRLASGAGSDEDFLGQAVKDKGSQKFISDDFIIQLLFSISFASFESISTTLTLILNYLADHPDVVKELEAEHEAIRNARADPDGPITWEEYKSMTFTLHVIFETLRLGSVTPALLRKTTKELQINGYTIPEGWTVMLVTASRHRDPAVYKDPHTFNPWRWKELDSITIQKNFMPFGGGLRHCAGAEYSKVYLCTFLHILFTKYRWTKLKGGKVARAHILSFEDGLHMKFTPKE

SEQ ID NO: 76 - protein, 474 aa, Cucumis sativus
MWTILLGLATLAIAYYIHWVNKWKDSKFNGVLPPGTMGLPLIGETIQLSRPSDSLDVHPFIQRKVKRYGPIFKTCLAGRPVVVSTDAEFNHYIMLQEGRAVEMWYLDTLSKFFGLDTEWLKALGLIHKYIRSITLNHFGAESLRERFLPRIEESARETLHYWSTQTSVEVKESAAAMVFRTSIVKMFSEDSSKLLTEGLTKKFTGLLGGFLTLPLNLPGTTYHKCIKDMKQIQKKLKDILEERLAKGVKIDEDFLGQAIKDKESQQFISEEFIIQLLFSISFASFESISTTLTLILNFLADHPDVVKELEAEHEAIRKARADPDGPITWEEYKSMNFTLNVICETLRLGSVTPALLRKTTKEIQIKGYTIPEGWTVMLVTASRHRDPEVYKDPDTFNPWRWKELDSITIQKNFMPFGGGLRHCAGAEYSKVYLCTFLHILFTKYRWRKLKGGKIARAHILRFEDGLYVNFTPKE

SEQ ID NO: 77 - protein, 474 aa, Cucurbita moschata
MWAIVVGLATLAVAYYIHWINKWKDSKFNGVLPPGTMGLPLVGETLQLARPSDSLDVHPFIKKKVKRYGSIFKTCLAGRPVVVSTDAEFNNYIMLQEGRAVEMWYLDTLSKFFGLDTEWLKALGFIHKYIRSITLNHFGAESLRERFLPRIEESAKETLRYWATQPSVEVKDSAAVMVFRTSMVKMVSEDSSKLLTGGLTKKFTGLLGGFLTLPINVPGTTYNKCMKDMKEIQKKLREILEGRLASGAGSDEDFLGQAIKDKGSQQFISDDFIIQLLFSISFASFESISTTLTLVLNYLADHPDVVKELEAEHEAIRNARADPDGPITWEEYKSMTFTLHVIFETLRLGSVTPALLRKTTKELQINGYTIPEGWTVMLVTASRHRDPAVYKDPHTFNPWRWKELDSITIQKNFMPFGGGLRHCAGAEYSKVYLCTFLHILFTKYRWTKLKGGKVARAHILSFEDGLHVKFTPKE

SEQ ID NO: 78 - protein, 476 aa, Prunus avium
MWTLVGLSLVALLVIYFTHWIIKWRNPKCNGVLPPGSMGLPLIGETLNLIIPSYSLDLHPFIKKRLQRYGPIFRTSLAGRPVVVTADPEFNNYIFQQEGRMVELWYLDTFSKIFVHEGDSKTNAIGMVHKYVRSIFLNHFGAERLKEKLLPQIEEFVNKSLCAWSSKASVEVKHAGSVMVFNFSAKQMISYDAEKSSDDLSEKYTKIIDGLMSFPLNIPGTAYYNCSKHQKNVTTMLRDMLKERRISPETRRGDFLDQLSIDMEKEKFLSEDFSVQLVFGGLFATFESISAVIALAFSLLADHPSVVEELTAEHEAILKNRENPNSSITWDEYKSMTFTLQVINEILRLGNVAPGLLRRALKDIPVKGFTIPEGWTIMVVTSALQLSPNTFEDPLEFNPWRWKDLDSYAVSKNFMPFGGGMRQCAGAEYSRVFLATFLHVLVTKYRWTTIKAARIARNPILGFGDGIHIKFEEKKT

SEQ ID NO: 79 - protein, 474 aa, Populus trichocarpa
MWAIGLVVVALVVIYYTHMIFKWRSPKIEGVLPPGSMGWPLIGETLQFISPGKSLDLHPFVKKRMEKYGPIFKTSLVGRPIIVSTDYEMNKYILQHEGTLVELWYLDSFAKFFALEGETRVNAIGTVHKYLRSITLNHFGVESLKESLLPKIEDMLHTNLAKWASQGPVDVKQVISVMVFNFTANKIFGYDAENSKEKLSENYTKILNSFISLPLNIPGTSFHKCMQDREKMLKMLKDTLMERLNDPSKRRGDFLDQAIDDMKTEKFLTEDFIPQLMFGILFASFESMSTTLTLTFKFLTENPRVVEELRAEHEAIVKKRENPNSRLTWEEYRSMTFTQMVVNETLRISNIPPGLFRKALKDFQVKGYTVPAGWTVMLVTPATQLNPDTFKDPVTFNPWRWQELDQVTISKNFMPFGGGTRQCAGAEYSKLVLSTFLHILVTNYSFTKIRGGDVSRTPIISFGDGIHIKFTARA

SEQ ID NO: 80 - protein, 476 aa, Prunus persica
MWTLVGLSLVGLLVIYFTHWIIKWRNPKCNGVLPPGSMGLPFIGETLNLIIPSYSLDLHPFIKKRLQRYGPIFRTSLAGRQVVVTADPEFNNYLFQQEGRMVELWYLDTFSKIFVHEGESKTNAVGMVHKYVRSIFLNHFGAERLKEKLLPQIEEFVNKSLCAWSSKASVEVKHAGSVMVFNFSAKQMISYDAEKSSDDLSEKYTKIIDGLMSFPLNIPGTAYYNCLKHQKNVTTMLRDMLKERQISPETRRGDFLDQISIDMEKEKFLSEDFSVQLVFGGLFATFESISAVLALAFSLLAEHPSVVEELTAEHEAILKNRENLNSSLTWDEYKSMTFTLQVINEILRLGNVAPGLLRRALKDIPVKGFTIPEGWTIMVVTSALQLSPNTFEDPLEFNPWRWKDLDSYAVSKNFMPFGGGMRQCAGAEYSRVFLATFLHVLVTKYRWTTIKAARIARNPILGFGDGIHIKFEEKKT

SEQ ID NO: 81 - protein, 476 aa, Populus euphratica
MWTFVLCVVAVLVVYYTHWINKWRNPTCNGVLPPGSMGLPIIGETLELIIPSYSLDLHPFIKKRIQRYGPIFRTNILGRPAVVSADPEINSYIFQNEGKLVEMWYMDTFSKLFAQSGESRTNAFGIIHKYARSLTLTHFGSESLKERLLPQVENIVSKSLQMWSSDASVDVKPAVSIMVCDFTAKQLFGYDAENSSDKISEKFTKVIDAFMSLPLNIPGTTYHKCLKDKDSTLSILRNTLKERMNSPAESRGGDFLDQIIADMDKEKFLTEDFTVNLIFGILFASFESISAALTLSLKLIGDHPSVLEELTVEHEAILKNRENPDSPLTWAEYNSMTFSLQVINETLRLGNVAPGLLRRALQDMQVKGYTIPAGWVIMVVNSALHLNPATFKDPLEFNPWRWKDFDSYAVSKNLMPFGGGRRQCAGSEFTKLFMAIFLHKLVTKYRWNIIKQGNIGRNPILGFGDGIHISFSPKDI

SEQ ID NO: 82 - protein, 475 aa, Juglans regia
MWKVGLCVVGVIVVWFTRWINKWRNPKCNGILPPGSMGPPLIGESLQLIIPSYSLDLHPFIKKRVQRYGPIFRTSVVGQPMVVSTDVEFNHYLAKQEGRLVHFWYLDSFAEIFNLEDENAISAVGLIHKYGRSIVLNHFGTDSLKKTLLSQIEEIVNKTLQTWSSLPSVEVKHAASVMAFDLTAKQCFGYDVENSAVKMSEKFLYTLDSLISFPFNIPGTVYHKCLKDKKEVLNMLRNIVKERMNSPEKYRGDFLDQITADMNKESFLTQDFIVYLLYGLLFASFESISASLSLTLKLLAEHPAVLQQLTAEHEAILKNRDNPNSSLTWDEYKSMTFTFQVINEALRLGNVAPGLLRRALKDIEFKGYTIPAGWTIMLANSAIQLNPNTYEDPLAFNPWRWQDLDPQIVSKNFMPFGGGIRQCAGAEYSKTFLATFLHVLVTKYRWTKVKGGKMARNPILWFADGIHINFALKHN

SEQ ID NO: 83 - protein, 476 aa, Pyrus x bretschneideri
MWDVVGLSFVALLVIYLTYWITQWKNPKCNGVLPPGSMGLPLIGETLNLLIPSYSLDLHPFIRKRLERYGPIFRTSLAGKPVLVSADPEFNNYVLKQEGRMVEFWYLDTFSKIFMQEGGNGTNQIGVIHKYARSIFLNHFGAECIKEKLLTQIEGSINKHLRAWSNQESVEVKKAGSIMALNFCAEHMIGYDAETATENLGEIYHRVFQGLISFPLNVPGTAYHNCLKIHKKATTMLRAMLRERRSSPEKRRGDFLDQIIDDLDQEKFLSEDFCIHLIFGGLFAIFESISTVLTLFFSLLADHPAVLQELTAEHEALLKNREDPNSALTWDEYKSMTFTLQVINETLRLVNTAPGLLRRALKDIPVKGYTIPAGWTILLVTPALHLTSNTFKDHLEFNPWRWKDLDSLVISKNFMPFGSGLRQCAGAEFSRAYLSTFLHVLVTKYRWTTIKGARISRRPMLTFGDGAHIKFSEKKN

SEQ ID NO: 84 - protein, 475 aa, Morus notabilis
MWNTICLSVVGLVVIWISNWIRRWRNPKCNGVLPPGSMGFPLIGETLPLIIPTYSLDLHPFIKNRLQRYGSIFRTSIVGRPVVISADPEFNNFLFQQEGSLVELYYLDTFSKIFVHEGVSRTNEFGVVHKYIRSIFLNHFGAERLKEKLLPEIEQMVNKTLSAWSTQASVEVKHAASVLVLDFSAKQIISYDAKKSSESLSETYTRIIQGFMSFPLNIPGTAYNQCVKDQKKIIAMLRDMLKERRASPETNRGDFLDQISKDMDKEKFLSEDFVVQLIFGGLFATFESVSAVLALGFMLLSEHPSVLEEMIAEHETILKNREHPNSLLAWGEYKSMTFTLQVINETLRLGNVAPGLLRKALKDIRVKGFTIPKGWAIMMVTSALQLSPSTFKNPLEFNPWRWKDLDSLVISKNFMPFGRGMRQCAGAEYSRAFMATFFHVLLTKYRWTTIKVGNVSRNPILRFGNGIHIKFSKKN

SEQ ID NO: 85 - protein, 475 aa, Jatropha curcas
MWIIGLCFASLLVIYCTHFFYKWRNPKCKGVLPPGSMGLPIIGETLQLIIPSYSLDHHPFIQKRIQRYGPIFRTNLVGRPVIVSADPEVNQYIFQQEGNSVEMWYLDAYAKIFQLDGESRLSAVGRVHKYIRSITLNNFGIENLKENLLPQIQDLVNQSLQKWSNKASVDVKQAASVMVFNLTAKQMFSYGVEKNSSEEMTEKFTGIFNSLMSLPLNIPGTTYHKCLKDREAMLKMLRDTLKQRLSSPDTHRGDFLDQAIDDMDTEKFLTGDCIPQLIFGILLAGFETTATTLTLAFKFLAEHPLVLEELTAEHEKILSKRENLESPLTWDEYKSMTFTHHVINETLRLANFLPGLLRKALKDIQVKNYTIPAGWTIMVVKSAMQLNPEIYKDPLAFNPWRWKDLDSYTVSKNFMPFGGGSRQCAGADYSKLFMTIFLHVLVTKYRWRKIKGGDIARNPILGFGDGLHIEVSAKN

SEQ ID NO: 86 - protein, 475 aa, Hevea brasiliensis
MLTVVLLLVGFFIIYYTYWISKWRNPNCNGVLPPGSMGFPLIGETLQLLIPSYSLDLHPFIKKRIHRYGPIFRSNLAGRPVIVSADPEFNYYILSQEGRSVEIWYLDTFSKLFRQQGESRTNVAGYVHKYLRGAFLSQIGSENLREKLLLHIQDMVNRTLCSWSNQESVEVKHSASLAVCDFTAKVLFGYDAEKSPDNLSETFTRFVEGLISFPLNIPRTAYRQCLQDRQKALSILKNVLTDRRNSVENYRGDVLDLLLNDMGKEKFLTEDFICLIMLGGLFASFESISTITTLLLKLFSAHPEVVQELEAEHEKILVSRHGSDSLSITWDEYKSMTFTHQVINETLRLGNVAPGLLRRAIKDVQFKGYTIPSGWTIMMVTSAQQVNPEVYKDPLVFNPWRWKDFDSITVSKNFTPFGGGTRQCVGAEYSRLTLSLFIHLLVTKYRWTKIKEGEIRRAPMLGFGDGIHFKFSEKE

SEQ ID NO: 87 - protein, 498 aa, Jatropha curcas
MKRAIYICLARITKQGLSLIEMLMTELLFGAFFIIFLTYWINRWRNPKCNGVLPPGSMGLPLLGETLQLLIPRYSLDLHPFIRKRIQRYGPIFRSNVAGRPIVFTADPELNHYIFIQERRLVELWYMDTFSNLFVLDGESRPTGATGYIHKYMRGLFLTHFGAERLKDKLLHQIQELIHTTLQSWCKQPTIEVKHAASAVICDFSAKFLFGYEAEKSPFNMSERFAKFAESLVSFPLNIPGTAYHQSLEDREKVMKLLKNVLRERRNSTKKSEEDVLKQILDDMEKENFITDDFIIQILFGALFAISESIPMTIALLVKFLSAQPSVVEELTAEHEEILKNKKEKGLDSSITWEDYKSMTFTLQVINETLRIANVAPGLLRRTLRDIHYKGYTIPAGWTIMVLTSSRHMNPEIYKDPVEFNPWRWKDLDSQTISKNFTPFGGGTRQCAGAEYSRAFISMFLHVLVTKYRWKNVKEGKICRGPILRIEDGIHIKLYEKH

SEQ ID NO: 88 - protein, 476 aa, Chenopodium quinoa
MWPTMGLYVATIVAICFILLELKRRNSREKQVVLPPGSKGFPLIGETLQLLVPSYSLDLPSFIRTRIQRYGPIFKTRLVGRPVVMSADPGFNRYIVQQEGKSVEMWYLDTFSKLFAQDGEARTTAAGLVHKYLRNLTLSHFGSESLRVNLLPHLESLVRNTLLGWSSKDTIDVKESALTMTIEFVAKQLFGYDSDKSKEKIGEKFGNISQGLFSLPLNIPGTTYHSCLKSQREVMDMMRTALKDRLTTPESYRGDFLDHALKDLSTEKFLSEEFILQIMFGLLFASSESTSMTLTLVLKLLSENPHVLKELEAEHERIIKNKESPDSPLTWAEVKSMTFTLQVINESLRLGNVSLGILRRTLKDIEINGYTIPAGWTIMLVTSACQYNSDIYKDPLTFNPWRWKEMQPDVIAKNFMPFGGGTRQCAGAEFAKVLMTIFLHNLVTNYRWEKIKGGEIVRTPILGFRNALRVKLTKKN

SEQ ID NO: 89 - protein, 448 aa, Spinacia oleracea
MVLLPGSKGFPFIGETLQLLLPSYSLDLPSFIRTRIQRYGPIFQTRLVGRPVVVSADPGFNRYIVQQEGKMVEMWYLDTFSKIFAQQGEGRTNAAGLVHKYLRNITFTHFGSQTLRDKLLPHLEILVRKTLHGWTSQESIDVKEAALTMTIEFVAKQLFGYDSDKSKERIGDKFANISQGLLSFPLNIPGTTYHSCLKSQREVMDMMRKTLKERLASPDTCQGDFLDHALKDLNTDKFLTEDFILQIMFGLLFASSESTSITLTLILKFLSENPHVLEELEVEHERILKNRESPDSPLTWAEVKSMTFTLQVINESLRLGNVSLGLLRRTLKDIEINGYTIPAGWTIMLVTSACQYNSDVYKDPLTFNPWRWKEMQPDVIAKNFMPFGGGTRQCAGAEFAKVLMTIFLHVLVTTYRWEKIKGGEIIRTPILGFRNGLHVKLIKKARLS

SEQ ID NO: 90 - protein, 477 aa, Manihot esculenta
MEMWSVWLYIISLIIIIATHWIYRWRNPKCNGKLPPGSMGIPFIGETIQFLIPSKSLDVPNFIKKRMNKYGPLFRTNLVGRPVIVSSDPDFNYYLLQREGKLVERWYMDSFSKLLHHDVTQIIIKHGSIHKYLRNLVLGHFGPEPLKDKLLPQLESAISQRLQDWSKQPSIEAKSASSAMIFDFTAKILFSYEPEKSGENIGEIFSNFLQGLMSIPLNIPGTAFHRCLKNQKRAIQMITEILKERRSNPEIHKGDFLDQIVEDMKKDSFWTEEFAIYMMFGLLLASFETISSTLALAIIFLTDNPPVVQKLTEEHEAILKARENRDSGLSWKEYKSLSYTHQVVNESLRLASVAPGILRRAITDIQVDGYTIPKGWTIMVVPAAVQLNPNTFEDPLVFNPSRWEDMGAVAMAKNFIAFGGGSRSCAGAEFSRVLMSVFVHVFVTNYRWTKIKGGDMVRSPALGFGNGFHIRVSEKQL

SEQ ID NO: 91 - protein, 474 aa, Olea europaea var. sylvestris
MAALDLSTVGYLIVGLLTVYITHWIYKWRNPKCNGVLPPGSMGLPLIGETIQLVIPNASLDLPPFIKKRMKRYGPIFRTNVAGRPVIITADPEFNHFLLRQDGKLVDTWSMDTFAEVFDQASQSSRKYTRHLTLNHFGVEALREKLLPQMEDMVRTTLSNWSSQESVEVKSASVTMAIDYAARQIYSGNLENAPLKISDLFRDLVDGLMSFPINIPGTAHHRCLQTHKKVREMMKDIVKTRLEEPERQYGDMLDHMIEDMKKESFLDEDFIVQLMFGLFFVTSDSISTTLALAFKLLAEHPLVLEELTAEHEAILKKREKSESHLTWNDYKSMTFTLQVINEVLRLGNIAPGFFRRALQDIPVNGYTIPSGWVIMIATAGLHLNSNQFEDPLKFNPWRWKVCKVSSVIAKCFMPFGSGMKQCAGAEYSRVLLATFIHVLTTKYRWAIVKGGKIVRSPIIRFPDGFHYKIIEKTN

SEQ ID NO: 92 - protein, 711 aa, Stevia rebaudiana
MAQSDSVKVSPFDLVSAAMNGKAMEKLNASESEDPTTLPALKMLVENRELLTLFTTSFAVLIGCLVFLMWRRSSSKKLVQDPVPQVIVVKKKEKESEVDDGKKKVSIFYGTQTGTAEGFAKALVEEAKVRYEKTSFKVIDLDDYAADDDEYEEKLKKESLAFFFLATYGDGEPTDNAANFYKWFTEGDDKGEWLKKLQYGVFGLGNRQYEHFNKIAIVVDDKLTEMGAKRLVPVGLGDDDQCIEDDFTAWKELVWPELDQLLRDEDDTSVTTPYTAAVLEYRVVYHDKPADSYAEDQTHTNGHVVHDAQHPSRSNVAFKKELHTSQSDRSCTHLEFDISHTGLSYETGDHVGVYSENLSEVVDEALKLLGLSPDTYFSVHADKEDGTPIGGASLPPPFPPCTLRDALTRYADVLSSPKKVALLALAAHASDPSEADRLKFLASPAGKDEYAQWIVANQRSLLEVMQSFPSAKPPLGVFFAAVAPRLQPRYYSISSSPKMSPNRIHVTCALVYETTPAGRIHRGLCSTWMKNAVPLTESPDCSQASIFVRTSNFRLPVDPKVPVIMIGPGTGLAPFRGFLQERLALKESGTELGSSIFFFGCRNRKVDFIYEDELNNFVETGALSELIVAFSREGTAKEYVQHKMSQKASDIWKLLSEGAYLYVCGDAKGMAKDVHRTLHTIVQEQGSLDSSKAELYVKNLQMSGRYLRDVW

SEQ ID NO: 93 - protein, 693 aa, Arabidopsis thaliana CPR1
MATSALYASDLFKQLKSIMGTDSLSDDVVLVIATTSLALVAGFVVLLWKKTTADRSGELKPLMIPKSLMAKDEDDDLDLGSGKTRVSIFFGTQTGTAEGFAKALSEEIKARYEKAAVKVIDLDDYAADDDQYEEKLKKETLAFFCVATYGDGEPTDNAARFYKWFTEENERDIKLQQLAYGVFALGNRQYEHFNKIGIVLDEELCKKGAKRLIEVGLGDDDQSIEDDFNAWKESLWSELDKLLKDEDDKSVATPYTAVIPEYRVVTHDPRFTTQKSMESNVANGNTTIDIHHPCRVDVAVQKELHTHESDRSCIHLEFDISRTGITYETGDHVGVYAENHVEIVEEAGKLLGHSLDLVFSIHADKEDGSPLESAVPPPFPGPCTLGTGLARYADLLNPPRKSALVALAAYATEPSEAEKLKHLTSPDGKDEYSQWIVASQRSLLEVMAAFPSAKPPLGVFFAAIAPRLQPRYYSISSSPRLAPSRVHVTSALVYGPTPTGRIHKGVCSTWMKNAVPAEKSHECSGAPIFIRASNFKLPSNPSTPIVMVGPGTGLAPFRGFLQERMALKEDGEELGSSLLFFGCRNRQMDFIYEDELNNFVDQGVISELIMAFSREGAQKEYVQHKMMEKAAQVWDLIKEEGYLYVCGDAKGMARDVHRTLHTIVQEQEGVSSSEAEAIVKKLQTEGRYLRDVW

SEQ ID NO: 94 - protein, 712 aa, Arabidopsis thaliana CPR2
MASSSSSSSTSMIDLMAAIIKGEPVIVSDPANASAYESVAAELSSMLIENRQFAMIVTTSIAVLIGCIVMLVWRRSGSGNSKRVEPLKPLVIKPREEEIDDGRKKVTIFFGTQTGTAEGFAKALGEEAKARYEKTRFKIVDLDDYAADDDEYEEKLKKEDVAFFFLATYGDGEPTDNAARFYKWFTEGNDRGEWLKNLKYGVFGLGNRQYEHFNKVAKVVDDILVEQGAQRLVQVGLGDDDQCIEDDFTAWREALWPELDTILREEGDTAVATPYTAAVLEYRVSIHDSEDAKFNDINMANGNGYTVFDAQHPYKANVAVKRELHTPESDRSCIHLEFDIAGSGLTYETGDHVGVLCDNLSETVDEALRLLDMSPDTYFSLHAEKEDGTPISSSLPPPFPPCNLRTALTRYACLLSSPKKSALVALAAHASDPTEAERLKHLASPAGKDEYSKWVVESQRSLLEVMAEFPSAKPPLGVFFAGVAPRLQPRFYSISSSPKIAETRIHVTCALVYEKMPTGRIHKGVCSTWMKNAVPYEKSENCSSAPIFVRQSNFKLPSDSKVPIIMIGPGTGLAPFRGFLQERLALVESGVELGPSVLFFGCRNRRMDFIYEEELQRFVESGALAELSVAFSREGPTKEYVQHKMMDKASDIWNMISQGAYLYVCGDAKGMARDVHRSLHTIAQEQGSMDSTKAEGFVKNLQTSGRYLRDVW

SEQ ID NO: 95 - protein, 713 aa, Arabidopsis thaliana
MASSSSSSSTSMIDLMAAIIKGEPVIVSDPANASAYESVAAELSSMLIENRQFAMIVTTSIAVLIGCIVMLVWRRSGSGNSKRVEPLKPLVIKPREEEIDDGRKKVTIFFGTQTGTAEGFAKALGEEAKARYEKTRFKIVDLDDYAADDDEYEEKLKKEDVAFFFLATYGDGEPTDNAARFYKWFTEGNDRGEWLKNLKYGVFGLGNRQYEHFNKVAKVVDDILVEQGAQRLVQVGLGDDDQCIEDDFTAWREALWPELDTILREEGDTAVATPYTAAVLEYRVSIHDSEDAKFNDITLANGNGYTVFDAQHPYKANVAVKRELHTPESDRSCIHLEFDIAGSGLTMKLGDHVGVLCDNLSETVDEALRLLDMSPDTYFSLHAEKEDGTPISSSLPPPFPPCNLRTALTRYACLLSSPKKSALVALAAHASDPTEAERLKHLASPAGKDEYSKWVVESQRSLLEVMAEFPSAKPPLGVFFAGVAPRLQPRFYSISSSPKIAETRIHVTCALVYEKMPTGRIHKGVCSTWMKNAVPYEKSEKLFLGRPIFVRQSNFKLPSDSKVPIIMIGPGTGLAPFRGFLQERLALVESGVELGPSVLFFGCRNRRMDFIYEEELQRFVESGALAELSVAFSREGPTKEYVQHKMMDKASDIWNMISQGAYLYVCGDAKGMARDVHRSLHTIAQEQGSMDSTKAEGFVKNLQTSGRYLRDVW

SEQ ID NO: 96 - protein, 710 aa, Stevia rebaudiana
MAQSESVEASTIDLMTAVLKDTVIDTANASDNGDSKMPPALAMMFEIRDLLLILTTSVAVLVGCFVVLVWKRSSGKKSGKELEPPKIVVPKRRLEQEVDDGKKKVTIFFGTQTGTAEGFAKALFEEAKARYEKAAFKVIDLDDYAADLDEYAEKLKKETYAFFFLATYGDGEPTDNAAKFYKWFTEGDEKGVWLQKLQYGVFGLGNRQYEHFNKIGIVVDDGLTEQGAKRIVPVGLGDDDQSIEDDFSAWKELVWPELDLLLRDEDDKAAATPYTAAIPEYRVVFHDKPDAFSDDHTQTNGHAVHDAQHPCRSNVAVKKELHTPESDRSCTHLEFDISHTGLSYETGDHVGVYCENLIEVVEEAGKLLGLSTDTYFSLHIDNEDGSPLGGPSLQPPFPPCTLRKALTNYADLLSSPKKSTLLALAAHASDPTEADRLRFLASREGKDEYAEWVVANQRSLLEVMEAFPSARPPLGVFFAAVAPRLQPRYYSISSSPKMEPNRIHVTCALVYEKTPAGRIHKGICSTWMKNAVPLTESQDCSWAPIFVRTSNFRLPIDPKVPVIMIGPGTGLAPFRGFLQERLALKESGTELGSSILFFGCRNRKVDYIYENELNNFVENGALSELDVAFSRDGPTKEYVQHKMTQKASEIWNMLSEGAYLYVCGDAKGMAKDVHRTLHTIVQEQGSLDSSKAELYVKNLQMSGRYLRDVW

SEQ ID NO: 97 - protein, 708 aa, Stevia rebaudiana CPR3
MAQSNSVKISPLDLVTALFSGKVLDTSNASESGESAMLPTIAMIMENRELLMILTTSVAVLIGCVVVLVWRRSSTKKSALEPPVIVVPKRVQEEEVDDGKKKVTVFFGTQTGTAEGFAKALVEEAKARYEKAVFKVIDLDDYAADDDEYEEKLKKESLAFFFLATYGDGEPTDNAARFYKWFTEGDAKGEWLNKLQYGVFGLGNRQYEHFNKIAKVVDDGLVEQGAKRLVPVGLGDDDQCIEDDFTAWKELVWPELDQLLRDEDDTTVATPYTAAVAEYRVVFHEKPDALSEDYSYTNGHAVHDAQHPCRSNVAVKKELHSPESDRSCTHLEFDISNTGLSYETGDHVGVYCENLSEVVNDAERLVGLPPDTYFSIHTDSEDGSPLGGASLPPPFPPCTLRKALTCYADVLSSPKKSALLALAAHATDPSEADRLKFLASPAGKDEYSQWIVASQRSLLEVMEAFPSAKPSLGVFFASVAPRLQPRYYSISSSPKMAPDRIHVTCALVYEKTPAGRIHKGVCSTWMKNAVPMTESQDCSWAPIYVRTSNFRLPSDPKVPVIMIGPGTGLAPFRGFLQERLALKEAGTDLGLSILFFGCRNRKVDFIYENELNNFVETGALSELIVAFSREGPTKEYVQHKMSEKASDIWNLLSEGAYLYVCGDAKGMAKDVHRTLHTIVQEQGSLDSSKAELYVKNLQMSGRYLRDVW

SEQ ID NO: 98 - protein, 705 aa, Artemisia annua CPR
MAQSTTSVKLSPFDLMTALLNGKVSFDTSNTSDTNIPLAVFMENRELLMILTTSVAVLIGCVVVLVWRRSSSAAKKAAESPVIVVPKKVTEDEVDDGRKKVTVFFGTQTGTAEGFAKALVEEAKARYEKAVFKVIDLDDYAAEDDEYEEKLKKESLAFFFLATYGDGEPTDNAARFYKWFTEGEEKGEWLDKLQYAVFGLGNRQYEHFNKIAKVVDEKLVEQGAKRLVPVGMGDDDQCIEDDFTAWKELVWPELDQLLRDEDDTSVATPYTAAVAEYRVVFHDKPETYDQDQLTNGHAVHDAQHPCRSNVAVKKELHSPLSDRSCTHLEFDISNTGLSYETGDHVGVYVENLSEVVDEAEKLIGLPPHTYFSVHADNEDGTPLGGASLPPPFPPCTLRKALASYADVLSSPKKSALLALAAHATDSTEADRLKFLASPAGKDEYAQWIVASHRSLLEVMEAFPSAKPPLGVFFASVAPRLQPRYYSISSSPRFAPNRIHVTCALVYEQTPSGRVHKGVCSTWMKNAVPMTESQDCSWAPIYVRTSNFRLPSDPKVPVIMIGPGTGLAPFRGFLQERLAQKEAGTELGTAILFFGCRNRKVDFIYEDELNNFVETGALSELVTAFSREGATKEYVQHKMTQKASDIWNLLSEGAYLYVCGDAKGMAKDVHRTLHTIVQEQGSLDSSKAELYVKNLQMAGRYLRDVW

SEQ ID NO: 99 - protein, 706 aa, CPR (PgCPR)
MAQSSSGSMSPFDFMTAIIKGKMEPSNASLGAAGEVTAMILDNRELVMILTTSIAVLIGCVVVFIWRRSSSQTPTAVQPLKPLLAKETESEVDDGKQKVTIFFGTQTGTAEGFAKALADEAKARYDKVTFKVVDLDDYAADDEEYEEKLKKETLAFFFLATYGDGEPTDNAARFYKWFLEGKERGEWLQNLKFGVFGLGNRQYEHFNKIAIVVDEILAEQGGKRLISVGLGDDDQCIEDDFTAWRESLWPELDQLLRDEDDTTVSTPYTAAVLEYRVVFHDPADAPTLEKSYSNANGHSVVDAQHPLRANVAVRRELHTPASDRSCTHLEFDISGTGIAYETGDHVGVYCENLAETVEEALELLGLSPDTYFSVHADKEDGTPLSGSSLPPPFPPCTLRTALTLHADLLSSPKKSALLALAAHASDPTEADRLRHLASPAGKDEYAQWIVASQRSLLEVMAEFPSAKPPLGVFFASVAPRLQPRYYSISSSPRIAPSRIHVTCALVYEKTPTGRVHKGVCSTWMKNSVPSEKSDECSWAPIFVRQSNFKLPADAKVPIIMIGPGTGLAPFRGFLQERLALKEAGTELGPSILFFGCRNSKMDYIYEDELDNFVQNGALSELVLAFSREGPTKEYVQHKMMEKASDIWNLISQGAYLYVCGDAKGMARDVHRTLHTIAQEQGSLDSSKAESMVKNLQMSGRYLRDVW

SEQ ID NO: 100 - protein, 348 aa, Acetobacter pasteurianus subsp. ascendens
MSVSKTTETFTSIPVIDISKLYSSDLAERKAVAEKLGDAARNIGFLYISGHNVSADLIEGVRKAARDFFAEPFEKKMEYYIGTSATHKGFVPEGEEVYSAGRPDHKEAFDIGYEVPANHPLVQAGTPLLGPNNWPDIPGFRSAAEAYYRTVFDLGRTLFRGFALALGLNESYFDTVANFPPSKLRMIHYPYDADAQDAPGIGAHTDYECFTILLADKPGLEVMNGNGDWIDAPPIPGAFVVNIGDMLEVMTAGEFVATAHRVRKVSEERYSFPLFYACDYHTQIRPLPAFAKKIDASYETITIGEHMWAQALQTYQYLVKKVEKGELKLPKGARKTATFGHFKRNSAA

SEQ ID NO: 101 - protein, 321 aa, Cucurbita maxima
MAAASSFSAAFYSGIPLIDLSAPDAKQLIVKACEELGFFKVVKHGVPMELISSLESESTKFFSLPLSEKQRAGPPSPFGYGNKQIGRNGDVGWVEYLLLNTHLESNSDGFLSMFGQDPQKLRSAVNDYISAVRNMAGEILELMAEGLKIQQRNVFSKLVMDEQSDSVFRVNHYPPCPDLQALKGTNMIGFGEHTDPQIISVLRSNNTSGFQISLADGNWISVPPDHSSFFINVGDSLQVMTNGRFKSVKHRVLTNSSKSRVSMIYFGGPPLSEKIAPLASLMQGEERSLYKEFTWFEYKRSAYNSRLADNRLVPFERIAAS

SEQ ID NO: 102 - protein, 353 aa, Dendrobium catenatum
MPSLSKEHFDLYSAFHVPETHAWSSSHLHDHPIAGDGATIPVIDISDPDAASMVGGACRSWGVFYATSHGIPADLLHQVESHARRLFSLPLHRKLQTAPRDGSLSGYGRPPISAFFPKLMWSEGFTLAGHDDHLAVTSQLSPFDSLSFCEVMEAYRKEMKKLAGRLFRLLILSLGLEEEEMGQVGPLKELSQAADAIQLNSYPTCPEPERAIGMAAHTDSAFLTVLHQTDGAGGLQVLRDQDESGSARWVDVLPRPDCLVVNVGDLLHILSNGRFKSVRHRAVVNRADHRISAAYFIGPPAHMKVGSITKLVDMRTGPMYRPVTWPEYLGIRTRLFDKALDSVKFQEKELEKD

SEQ ID NO: 103 - protein, 377 aa, Cucurbita maxima
MATTIADVFKSFPVHIPAHKNLDFDSLHELPDSYAWIQPDSFPSPTHKHHNSILDSDSDSVPLIDLSLPNAAALIGNAFRSWGAFQVINHGVPISLLQSIESSADTLFSLPPSHKLKAARTPDGISGYGLVRISSFFPKRMWSEGFTIVGSPLDHFRQLWPHDYHKHCEIVEEYDREMRSLCGRLMWLGLGELGITRDDMKWAGPDGDFKTSPAATQFNSYPVCPDPDRAMGLGPHTDTSLLTIVYQSNTRGLQVLREGKRWVTVEPVAGGLVVQVGDLLHILTNGLYPSALHQAVVNRTRKRLSVAYVFGPPESAEISPLKKLLGPTQPPLYRPVTWTEYLGKKAEHFNNALSTVRLCAPITGLLDVNDHSRVKVG

SEQ ID NO: 104 - protein, 378 aa, Cucurbita maxima
MHVVTSTPEARHDGAPLVFDASVLRHQHNIPKQFIWPDEEKPAATCPELEVPLIDLSGFLSGEKDAAAEAVRLVGEACEKHGFFLVVNHGVDRKLIGEAHKYMDEFFELPLSQKQSAQRKAGEHCGYASSFTGRFSSKLPWKETLSFRFAADESLNNLVLHYLNDKLGDQFAKFGRVYQDYCEAMSGLSLGIMELLGKSLGVEEQCFKNFFKDNDSIMRLNFYPPCQKPHLTLGTGPHCDPTSLTILHQDQVGGLQVFVDNQWRLITPNFDAFVVNIGDTFMALSNGRYKSCLHRAVVNSERTRKSLAFFLCPRNDKVVRPPRELVDTQNPRRYPDFTWSMLLRFTQTHYRADMKTLEAFSAWLQQEQQEQQEQQFNI

SEQ ID NO: 105 - protein, 361 aa, Agapanthus praecox subsp. orientalis
MVLQPFVFDAALLRDEHNIPTQFIWPEEDKPSPDASEELILPFIDLKAFLSGDPDSPFQVSKQVGEACESLGAFQVTNHGIDFDLLEEAHSCIQKFFSMPLCEKQRALRKAGESYGYASSFTGRFCSKLPWKETLSFRYSSSSSDIVQNYFVRTLGEEFRHFGEVYQKYCESMSKLSLMIMEVLGLSLGVGRMHFREFFEGNDSTMRLNYYPPCKKPDLTLGTGPHCDPTSLTILHQDDVSGLQVFTGGKWLTVRPKTDAFVVNIGDTFTALSNGRYKSCLHRAVVNSKTARKSLAFFLCPAMNKIVRPPRELVDIDHPRAYPDFTWSALLEFTQKHYRADMQTLNEFSKYILQAQGTLHK

SEQ ID NO: 106 - protein, 358 aa, Arabidopsis thaliana
MAPGTLTELAGESKLNSKFVRDEDERPKVAYNVFSDEIPVISLAGIDDVDGKRGEICRQIVEACENWGIFQVVDHGVDTNLVADMTRLARDFFALPPEDKLRFDMSGGKKGGFIVSSHLQGEAVQDWREIVTYFSYPVRNRDYSRWPDKPEGWVKVTEEYSERLMSLACKLLEVLSEAMGLEKESLTNACVDMDQKIVVNYYPKCPQPDLTLGLKRHTDPGTITLLLQDQVGGLQATRDNGKTWITVQPVEGAFVVNLGDHGHFLSNGRFKNADHQAVVNSNSSRLSIATFQNPAPDATVYPLKVREGEKAILEEPITFAEMYKRKMGRDLELARLKKLAKEERDHKEVDKPVDQIFA

SEQ ID NO: 107 - protein, 376 aa, Chrysosplenium americanum
QEKTLNSRFVARDEDSLERPKVSAIYNGSFDEIPVLISLAGIDMTGAGTDAAARRSEICRKIVEACEDWGIFGEIDDDHGKRAEICDKIVKACEDWGVFQPDEKLESVMSAAKKGDFVVDHGVDAEVISQWTTFAKPTSHTQFETETTRDFPNKPEGWKATTEQYSRTLMGLACKLLGVISEAMGLEKEALTKACVDMDQKVVVNYYPKCPQPDLTLGLKRHTDPGTITLLLQDQVGGLQATRDGGKTWITVQPVKDNGWILLHIGDSNGHRHGHFLSNGRFKSHQAYRYRRPTRGSPTFGTKVSNYPPCPEQSLVRPPAGRPYGRALNALDAKKLASAKQQLESAAILLISELAVAYIILAILPSSEIIAEEGYL

SEQ ID NO: 108 - protein, 347 aa, Datura stramonium
MATFVSNWSTNNVSESFIAPLEKRAEKDVALGNDVPIIDLQQDHLLIVQQITKACQDFGLFQVINHGVPEKLMVEAMEVYKEFFALPAEEKEKFQPKGEPAKFELPLEQKAKLYVEGERRCNEEFLYWKDTLAHGCYPLHEELLNSWPEKPPTYRDVIAKYSVEVRKLTMRILDYICEGLGLKLGYFDNELTQIQMLLANYYPSCPDPSSTIGSGGHYDGNLITLLQQDLVGLQQLIVKDDKWIAVEPIPTAFVVNLGLTLKVMSNEKFEGSIHRVVTHPTRNRISIGTLIGPDYSCTIEPIKELLSQENPPLYKPYPYAKFAEIYLSDKSDYDAGVKPYKINQFPN

SEQ ID NO: 109 - protein, 329 aa, Arabidopsis thaliana
MENHTTMKVSSLNCIDLANDDLNHSVVSLKQACLDCGFFYVINHGISEEFMDDVFEQSKKLFALPLEEKMKVLRNEKHRGYTPVLDELLDPKNQINGDHKEGYYIGIEVPKDDPHWDKPFYGPNPWPDADVLPGWRETMEKYHQEALRVSMAIARLLALALDLDVGYFDRTEMLGKPIATMRLLRYQGISDPSKGIYACGAHSDFGMMTLLATDGVMGLQICKDKNAMPQKWEYVPPIKGAFIVNLGDMLERWSNGFFKSTLHRVLGNGQERYSIPFFVEPNHDCLVECLPTCKSESELPKYPPIKCSTYLTQRYEETHANLSIYHQQT

SEQ ID NO: 110 - protein, 511 aa, Solanum lycopersicum
MALRINELFVAAIIYIIVHIIISKLITTVRERGRRLPLPPGPTGWPVIGALPLLGSMPHVALAKMAKKYGPIMYLKVGTCGMVVASTPNAAKAFLKTLDINFSNRPPNAGATHLAYNAQDMVFAPYGPRWKLLRKLSNLHMLGGKALENWANVRANELGHMLKSMFDASQDGECVVIADVLTFAMANMIGQVMLSKRVFVEKGVEVNEFKNMVVELMTVAGYFNIGDFIPKLAWMDIQGIEKGMKNLHKKFDDLLTKMFDEHEATSNERKENPDFLDVVMANRDNSEGERLSTTNIKALLLNLFTAGTDTSSSVIEWALAEMMKNPKIFEKAQQEMDQVIGKNRRLIESDIPNLPYLRAICKETFRKHPSTPLNLPRVSSEPCTVDGYYIPKNTRLSVNIWAIGRDPDVWENPLEFTPERFLSGKNAKIEPRGNDFELIPFGAGRRICAGTRMGIVMVEYILGTLVHSFDWKLPNNVIDINMEESFGLALQKAVPLEAMVTPRLSLDVYRC

SEQ ID NO: 111 - protein, 401 aa, D4H
MPKSWPIVISSHSFCFLPNSEQERKMKDLNFHAATLSEEESLRELKAFDETKAGVKGIVDTGITKIPRIFIDQPKNLDRISVCRGKSDIKIPVINLNGLSSNSEIRREIVEKIGEASEKYGFFQIVNHGIPQDVMDKMVDGVRKFHEQDDQIKRQYYSRDRFNKNFLYSSNYVLIPGIACNWRDTMECIMNSNQPDPQEFPDVCRDILMKYSNYVRNLGLILFELLSEALGLKPNHLEEMDCAEGLILLGHYYPACPQPELTFGTSKHSDSGFLTILMQDQIGGLQILLENQWIDVPFIPGALVINIADLLQLITNDKFKSVEHRVLANKVGPRISVAVAFGIKTQTQEGVSPRLYGPIKELISEENPPIYKEVTVKDFITIRFAKRFDDSSSLSPFRLNN

SEQ ID NO: 112 - protein, 372 aa, Catharanthus roseus
MKELNNSEEELKAFDDTKAGVKALVDSGITEIPRIFLDHPTNLDQISSKDREPKFKKNIPVIDLDGISTNSEIRREIVEKIREASEKWGFFQIVNHGIPQEVMDDMIVGIRRFHEQDNEIKKQFYTRDRTKSFRYTSNFVLNPKIACNWRDTFECTMAPHQPNPQDLPDICRDIMMKYISYTRNLGLTLFELLSEALGLKSNRLKDMHCDEGVELVGHYYPACPQPELTLGTSKHTDTGFLTMLQQDQIGGLQVLYENHQWVDVPFIPGALIINIGDFLQIISNDKFKSAPHRVLANKNGPRISTASVFMPNFLESAEVRLYGPIKELLSEENPPIYEQITAKDYVTVQFSRGLDGDSFLSPFMLNKDNMEK

SEQ ID NO: 113 - protein, 374 aa, Zea mays
MAPTTATKDDSGYGDERRRELQAFDDTKLGVKGLVDSGVKSIPSIFHHPPEALSDIISPAPLPSSPPSGAAIPVVDLSVTRREDLVEQVRHAAGTVGFFWLVNHGVAEELMGGMLRGVRQFNEGPVEAKQALYSRDLARNLRFASNFDLFKAAAADWRDTLFCEVAPNPPPREELPEPLRNVMLEYGAAVTKLARFVFELLSESLGMPSDHLYEMECMQNLNVVCQYYPPCPEPHRTVGVKRHTDPGFFTILLQDGMGGLQVRLGNNGQSGGCWVDIAPRPGALMVNIGDLLQLVTNDRFRSVEHRVPANKSSDTARVSVASFFNTDVRRSERMYGPIPDPSKPPLYRSVRARDFIAKFNTIGLDGRALDHFRL

SEQ ID NO: 114 - protein, 338 aa, Hordeum vulgare subsp. vulgare
MAKVMNLTPVHASSIPDSFLLPADRLHPATTDVSLPIIDMSRGRDEVRQAILDSGKEYGFIQVVNHGISEPMLHEMYAVCHEFFDMPAEDKAEFFSEDRSERNKLFCGSAFETLGEKYWIDVLELLYPLPSGDTKDWPHKPQMLREVVGNYTSLARGVAMEILRLLCEGLGLRPDFFVGDISGGRVVVDINYYPPSPNPSRTLGLPPHCDRDLMTVLLPGAVPGLEIAYKGGWIKVQPVPNSLVINFGLQLEVVTNGYLKAVEHRAATNFAEPRLSVASFIVPADDCVVGPAEEFVSEDNPPRYRTLTVGEFKRKHNVVNLDSSINQIININNNQKGI

SEQ ID NO: 115 - protein, 339 aa, Hordeum vulgare subsp. vulgare
MENILHATPAPVSLPESFVFASDKVPPATKAVVSLPIIDLSCGRDEVRRSILEAGKELGFFQVVNHGVSKQVMRDMEGMCEQFFHLPAADKASLYSEERHKPNRLFSGATYDTGGEKYWRDCLRLACPFPVDDSINEWPDTPKGLRDVIEKFTSQTRDVGKELLRLLCEGMGIRADYFEGDLSGGNVILNINHYPSCPNPDKALGQPPHCDRNLITLLLPGAVNGLEVSYKGDWIKVDPAPNAFVVNFGQQLEVVTNGLLKSIEHRAMTNSALARTSVATFIMPTQECLIGPAKEFLSKENPPCYRTTMFRDFMRIYNVVKLGSSLNLTTNLKNVQKEI

SEQ ID NO: 116 - protein, 523 aa, Siraitia grosvenorii UGT720-269-1
MEDRNAMDMSRIKYRPQPLRPASMVQPRVLLFPFPALGHVKPFLSLAELLSDAGIDVVFLSTEYNHRRISNTEALASRFPTLHFETIPDGLPPNESRALADGPLYFSMREGTKPRFRQLIQSLNDGRWPITCIITDIMLSSPIEVAEEFGIPVIAFCPCSARYLSIHFFIPKLVEEGQIPYADDDPIGEIQGVPLFEGLLRRNHLPGSWSDKSADISFSHGLINQTLAAGRASALILNTFDELEAPFLTHLSSIFNKIYTIGPLHALSKSRLGDSSSSASALSGFWKEDRACMSWLDCQPPRSVVFVSFGSTMKMKADELREFWYGLVSSGKPFLCVLRSDVVSGGEAAELIEQMAEEEGAGGKLGMVVEWAAQEKVLSHPAVGGFLTHCGWNSTVESIAAGVPMMCWPILGDQPSNATWIDRVWKIGVERNNREWDRLTVEKMVRALMEGQKRVEIQRSMEKLSKLANEKVVRGINLHPTISLKKDTPTTSEHPRHEFENMRGMNYEMLVGNAIKSPTLTKK

SEQ ID NO: 117 - protein, 473 aa, Siraitia grosvenorii UGT94-289-3
MTIFFSVEILVLGIAEFAAIAMDAAQQGDTTTILMLPWLGYGHLSAFLELAKSLSRRNFHIYFCSTSVNLDAIKPKLPSSFSDSIQFVELHLPSSPEFPPHLHTTNGLPPTLMPALHQAFSMAAQHFESILQTLAPHLLIYDSLQPWAPRVASSLKIPAINFNTTGVFVISQGLHPIHYPHSKFPFSEFVLHNHWKAMYSTADGASTERTRKRGEAFLYCLHASCSVILINSFRELEGKYMDYLSVLLNKKVVPVGPLVYEPNQDGEDEGYSSIKNWLDKKEPSSTVFVSFGSEYFPSKEEMEEIAHGLEASEVNFIWVVRFPQGDNTSGIEDALPKGFLERAGERGMVVKGWAPQAKILKHWSTGGFVSHCGWNSVMESMMFGVPIIGVPMHVDQPFNAGLVEEAGVGVEAKRDPDGKIQRDEVAKLIKEVVVEKTREDVRKKAREMSEILRSKGEEKFDEMVAEISLLLKI

SEQ ID NO: 118 - protein, 460 aa, Siraitia grosvenorii UGT74-345-2
MDETTVNGGRRASDVVVFAFPRHGHMSPMLQFSKRLVSKGLRVTFLITTSATESLRLNLPPSSSLDLQVISDVPESNDIATLEGYLRSFKATVSKTLADFIDGIGNPPKFIVYDSVMPWVQEVARGRGLDAAPFFTQSSAVNHILNHVYGGSLSIPAPENTAVSLPSMPVLQAEDLPAFPDDPEVVMNFMTSQFSNFQDAKWIFFNTFDQLECKKQSQVVNWMADRWPIKTVGPTIPSAYLDDGRLEDDRAFGLNLLKPEDGKNTRQWQWLDSKDTASVLYISFGSLAILQEEQVKELAYFLKDTNLSFLWVLRDSELQKLPHNFVQETSHRGLVVNWCSQLQVLSHRAVSCFVTHCGWNSTLEALSLGVPMVAIPQWVDQTTNAKFVADVWRVGVRVKKKDERIVTKEELEASIRQVVQGEGRNEFKHNAIKWKKLAKEAVDEGGSSDKNIEEFVKTIA

SEQ ID NO: 119 - protein, 486 aa, Siraitia grosvenorii UGT75-281-2
MGDNGDGGEKKELKENVKKGKELGRQAIGEGYINPSLQLARRLISLGVNVTFATTVLAGRRMKNKTHQTATTPGLSFATFSDGFDDETLKPNGDLTHYFSELRRCGSESLTHLITSAANEGRPITFVIYSLLLSWAADIASTYDIPSALFFAQPATVLALYFYYFHGYGDTICSKLQDPSSYIELPGLPLLTSQDMPSFFSPSGPHAFILPPMREQAEFLGRQSQPKVLVNTFDALEADALRAIDKLKMLAIGPLIPSALLGGNDSSDASFCGDLFQVSSEDYIEWLNSKPDSSVVYISVGSICVLSDEQEDELVHALLNSGHTFLWVKRSKENNEGVKQETDEEKLKKLEEQGKMVSWCRQVEVLKHPALGCFLTHCGWNSTIESLVSGLPVVAFPQQIDQATNAKLIEDVWKTGVRVKANTEGIVEREEIRRCLDLVMGSRDGQKEEIERNAKKWKELARQAIGEGGSSDSNLKTFLWEIDLEI

SEQ ID NO: 120 - protein, 485 aa, Siraitia grosvenorii UGT720-269-4
MAEQAHDLLHVLLFPFPAEGHIKPFLCLAELLCNAGFHVTFLNTDYNHRRLHNLHLLAARFPSLHFESISDGLPPDQPRDILDPKFFISICQVTKPLFRELLLSYKRISSVQTGRPPITCVITDVIFRFPIDVAEELDIPVFSFCTFSARFMFLYFWIPKLIEDGQLPYPNGNINQKLYGVAPEAEGLLRCKDLPGHWAFADELKDDQLNFVDQTTASSRSSGLILNTFDDLEAPFLGRLSTIFKKIYAVGPIHSLLNSHHCGLWKEDHSCLAWLDSRAAKSVVFVSFGSLVKITSRQLMEFWHGLLNSGKSFLFVLRSDVVEGDDEKQVVKEIYETKAEGKWLVVGWAPQEKVLAHEAVGGFLTHSGWNSILESIAAGVPMISCPKIGDQSSNCTWISKVWKIGLEMEDRYDRVSVETMVRSIMEQEGEKMQKTIAELAKQAKYKVSKDGTSYQNLECLIQDIKKLNQIEGFINNPNFSDLLRV

SEQ ID NO: 121 - protein, 473 aa, Siraitia grosvenorii UGT94-289-2
MDAQQGHTTTILMLPWVGYGHLLPFLELAKSLSRRKLFHIYFCSTSVSLDAIKPKLPPSISSDDSIQLVELRLPSSPELPPHLHTTNGLPSHLMPALHQAFVMAAQHFQVILQTLAPHLLIYDILQPWAPQVASSLNIPAINFSTTGASMLSRTLHPTHYPSSKFPISEFVLHNHWRAMYTTADGALTEEGHKIEETLANCLHTSCGVVLVNSFRELETKYIDYLSVLLNKKVVPVGPLVYEPNQEGEDEGYSSIKNWLDKKEPSSTVFVSFGTEYFPSKEEMEEIAYGLELSEVNFIWVLRFPQGDSTSTIEDALPKGFLERAGERAMVVKGWAPQAKILKHWSTGGLVSHCGWNSMMEGMMFGVPIIAVPMHLDQPFNAGLVEEAGVGVEAKRDSDGKIQREEVAKSIKEVVIEKTREDVRKKAREMDTKHGPTYFSRSKVSSFGRLYKINRPTTLTVGRFWSKQIKMKRE

SEQ ID NO: 122 - protein, 453 aa, Siraitia grosvenorii UGT94-289-1
MDAQRGHTTTILMFPWLGYGHLSAFLELAKSLSRRNFHIYFCSTSVNLDAIKPKLPSSSSSDSIQLVELCLPSSPDQLPPHLHTTNALPPHLMPTLHQAFSMAAQHFAAILHTLAPHLLIYDSFQPWAPQLASSLNIPAINFNTTGASVLTRMLHATHYPSSKFPISEFVLHDYWKAMYSAAGGAVTKKDHKIGETLANCLHASCSVILINSFRELEEKYMDYLSVLLNKKVVPVGPLVYEPNQDGEDEGYSSIKNWLDKKEPSSTVFVSFGSEYFPSKEEMEEIAHGLEASEVHFIWVVRFPQGDNTSAIEDALPKGFLERVGERGMVVKGWAPQAKILKHWSTGGFVSHCGWNSVMESMMFGVPIIGVPMHLDQPFNAGLAEEAGVGVEAKRDPDGKIQRDEVAKLIKEVVVEKTREDVRKKAREMSEILRSKGEEKMDEMVAAISLFLKI

SEQ ID NO: 123 - protein, 472 aa, Momordica charantia 1
MAQPQTQARVLVFPYPTVGHIKPFLSLAELLADGGLDVVFLSTEYNHRRIPNLEALASRFPTLHFDTIPDGLPIDKPRVIIGGELYTSMRDGVKQRLRQVLQSYNDGSSPITCVICDVMLSGPIEAAEELGIPVVTFCPYSARYLCAHFVMPKLIEEGQIPFTDGNLAGEIQGVPLFGGLLRRDHLPGFWFVKSLSDEVWSHAFLNQTLAVGRTSALIINTLDELEAPFLAHLSSTFDKIYPIGPLDALSKSRLGDSSSSSTVLTAFWKEDQACMSWLDSQPPKSVIFVSFGSTMRMTADKLVEFWHGLVNSGTRFLCVLRSDIVEGGGAADLIKQVGETGNGIVVEWAAQEKVLAHRAVGGFLTHCGWNSTMESIAAGVPMMCWQIYGDQMINATWIGKVWKIGIERDDKWDRSTVEKMIKELMEGEKGAEIQRSMEKFSKLANDKVVKGGTSFENLELIVEYLKKLKPSN

SEQ ID NO: 124 - protein, 466 aa, Momordica charantia 2
MAQPRVLLFPFPAMGHVKPFLSLAELLSDAGVEVVFLSTEYNHRRIPDIGALAARFPTLHFETIPDGLPPDQPRVLADGHLYFSMLDGTKPRFRQLIQSLNGNPRPITCIINDVMLSSPIEVAEEFGIPVIAFCPCSARFLSVHFFMPNFIEEAQIPYTDENPMGKIEEATVFEGLLRRKDLPGLWCAKSSNISFSHRFINQTIAAGRASALILNTFDELESPFLNHLSSIFPKIYCIGPLNALSRSRLGKSSSSSSALAGFWKEDQAYMSWLESQPPRSVIFVSFGSTMKMEAWKLAEFWYGLVNSGSPFLFVFRPDCVINSGDAAEVMEGRGRGMVVEWASQEKVLAHPAVGGFLTHCGWNSTVESIVAGVPMMCCPIVADQLSNATWIHKVWKIGIEGDEKWDRSTVEMMIKELMESQKGTEIRTSIEMLSKLANEKVVKGGTSLNNFELLVEDIKTLRRPYT

SEQ ID NO: 125 - protein, 482 aa, Momordica charantia 3
MEQSDSNSDDHQHHVLLFPFPAKGHIKPFLCLAQLLCGAGLQVTFLNTDHNHRRIDDRHRRLLATQFPMLHFKSISDGLPPDHPRDLLDGKLIASMRRVTESLFRQLLLSYNGYGNGTNNVSNSGRRPPISCVITDVIFSFPVEVAEELGIPVFSFATFSARFLFLYFWIPKLIQEGQLPFPDGKTNQELYGVPGAEGIIRCKDLPGSWSVEAVAKNDPMNFVKQTLASSRSSGLILNTFEDLEAPFVTHLSNTFDKIYTIGPIHSLLGTSHCGLWKEDYACLAWLDARPRKSVVFVSFGSLVKTTSRELMELWHGLVSSGKSFLLVLRSDVVEGEDEEQVVKEILESNGEGKWLVVGWAPQEEVLAHEAIGGFLTHSGWNSTMESIAAGVPMVCWPKIGDQPSNCTWVSRVWKVGLEMEERYDRSTVARMARSMMEQEGKEMERRIAELAKRVKYRVGKDGESYRNLESLIRDIKITKSSN

SEQ ID NO: 126 - protein, 450 aa, Momordica charantia 4
MDAHQQAEHTTTILMLPWVGYGHLTAYLELAKALSRRNFHIYYCSTPVNIESIKPKLTIPCSSIQFVELHLPSSDDLPPNLHTTNGLPSHLMPTLHQAFSAAAPLFEEILQTLCPHLLIYDSLQPWAPKIASSLKIPALNFNTSGVSVIAQALHAIHHPDSKFPLSDFILHNYWKSTYTTADGGASEKTRRAREAFLYCLNSSGNAILINTFRELEGEYIDYLSLLLNKKVIPIGPLVYEPNQDEDQDEEYRSIKNWLDKKEPCSTVFVSFGSEYFPSNEEMEEIAPGLEESGANFIWVVRFPKLENRNGIIEEGLLERAGERGMVIKEWAPQARILRHGSIGGFVSHCGWNSVMESIICGVPVIGVPMRVDQPYNAGLVEEAGVGVEAKRDPDGKIQRHEVSKLIKQVVVEKTRDDVRKKVAQMSEILRRKGDEKIDEMVALISLLPKG

SEQ ID NO: 127 - protein, 450 aa, Momordica charantia 5
MDARQQAEHTTTILMLPWVGYGHLSAYLELAKALSRRNFHIYYCSTPVNIESIKPKLTIPCSSIQFVELHLPFSDDLPPNLHTTNGLPSHLMPALHQAFSAAAPLFEAILQTLCPHLLIYDSLQPWAPQIASSLKIPALNFNTTGVSVIARALHTIHHPDSKFPLSEIVLHNYWKATHATADGANPEKFRRDLEALLCCLHSSCNAILINTFRELEGEYIDYLSLLLNKKVTPIGPLVYEPNQDEEQDEEYRSIKNWLDKKEPYSTIFVSFGSEYFPSNEEMEEIARGLEESGANFIWVVRFHKLENGNGITEEGLLERAGERGMVIQGWAPQARILRHGSIGGFVSHCGWNSVMESIICGVPVIGVPMGLDQPYNAGLVEEAGVGVEAKRDPDGKIQRHEVSKLIKQVVVEKTRDDVRKKVAQMSEILRRKGDEKIDEMVALISLLLKG

SEQ ID NO: 128 - protein, 471 aa, Cucumis sativus
MGLSPTDHVLLFPFPAKGHIKPFFCLAHLLCNAGLRVTFLSTEHHHQKLHNLTHLAAQIPSLHFQSISDGLSLDHPRNLLDGQLFKSMPQVTKPLFRQLLLSYKDGTSPITCVITDLILRFPMDVAQELDIPVFCFSTFSARFLFLYFSIPKLLEDGQIPYPEGNSNQVLHGIPGAEGLLRCKDLPGYWSVEAVANYNPMNFVNQTIATSKSHGLILNTFDELEVPFITNLSKIYKKVYTIGPIHSLLKKSVQTQYEFWKEDHSCLAWLDSQPPRSVMFVSFGSIVKLKSSQLKEFWNGLVDSGKAFLLVLRSDALVEETGEEDEKQKELVIKEIMETKEEGRWVIVNWAPQEKVLEHKAIGGFLTHSGWNSTLESVAVGVPMVSWPQIGDQPSNATWLSKVWKIGVEMEDSYDRSTVESKVRSIMEHEDKKMENAIVELAKRVDDRVSKEGTSYQNLQRLIEDIEGFKLN

SEQ ID NO: 129 - protein, 462 aa, Cucurbita maxima 1
MELSHTHHVLLFPFPAKGHIKPFFSLAQLLCNAGLRVTFLNTDHHHRRIHDLNRLAAQLPTLHFDSVSDGLPPDEPRNVFDGKLYESIRQVTSSLFRELLVSYNNGTSSGRPPITCVITDVMFRFPIDIAEELGIPVFTFSTFSARFLFLIFWIPKLLEDGQLRYPEQELHGVPGAEGLIRWKDLPGFWSVEDVADWDPMNFVNQTLATSRSSGLILNTFDELEAPFLTSLSKIYKKIYSLGPINSLLKNFQSQPQYNLWKEDHSCMAWLDSQPRKSVVFVSFGSVVKLTSRQLMEFWNGLVNSGMPFLLVLRSDVIEAGEEVVREIMERKAEGRWVIVSWAPQEEVLAHDAVGGFLTHSGWNSTLESLAAGVPMISWPQIGDQTSNSTWISKVWRIGLQLEDGFDSSTIETMVRSIMDQTMEKTVAELAERAKNRASKNGTSYRNFQTLIQDITNIIETHI

SEQ ID NO: 130 - protein, 454 aa, Cucurbita maxima 2
MDAQKAVDTPPTTVLMLPWIGYGHLSAYLELAKALSRRNFHVYFCSTPVNLDSIKPNLIPPPSSIQFVDLHLPSSPELPPHLHTTNGLPSHLKPTLHQAFSAAAQHFEAILQTLSPHLLIYDSLQPWAPRIASSLNIPAINFNTTAVSIIAHALHSVHYPDSKFPFSDFVLHDYWKAKYTTADGATSEKIRRGAEAFLYCLNASCDVVLVNSFRELEGEYMDYLSVLLKKKVVSVGPLVYEPSEGEEDEEYWRIKKWLDEKEALSTVLVSFGSEYFPSKEEMEEIAHGLEESEANFIWVVRFPKGEESCRGIEEALPKGFVERAGERAMVVKKWAPQGKILKHGSIGGFVSHCGWNSVLESIRFGVPVIGVPMHLDQPYNAGLLEEAGIGVEAKRDADGKIQRDQVASLIKRVVVEKTREDIWKTVREMREVLRRRDDDMIDEMVAEISVVLKI

SEQ ID NO: 131 - protein, 492 aa, Cucurbita maxima 3
MSSNLFLKISIPFGRLRDSALNCSVFHCKLHLAIAIAMDAQQAANKSPTATTIFMLPWAGYGHLSAYLELAKALSTRNFHIYFCSTPVSLASIKPRLIPSCSSIQFVELHLPSSDEFPPHLHTTNGLPSRLVPTFHQAFSEAAQTFEAFLQTLRPHLLIYDSLQPWAPRIASSLNIPAINFFTAGAFAVSHVLRAFHYPDSQFPSSDFVLHSRWKIKNTTAESPTQAKLPKIGEAIGYCLNASRGVILTNSFRELEGKYIDYLSVILKKRVFPIGPLVYQPNQDEEDEDYSRIKNWLDRKEASSTVLVSFGSEFFLSKEETEAIAHGLEQSEANFIWGIRFPKGAKKNAIEEALPEGFLERAGGRAMVVEEWVPQGKILKHGSIGGFVSHCGWNSAMESIVCGVPIIGIPMQVDQPFNAGILEEAGVGVEAKRDSDGKIQRDEVAKLIKEVVVERTREDIRNKLEKINEILRSRREEKLDELATEISLLSRN

SEQ ID NO: 132 - protein, 462 aa, Cucurbita moschata 1
MELSPTHHLLLFPFPAKGHIKPFFSLAQLLCNAGARVTFLNTDHHHRRIHDLDRLAAQLPTLHFDSVSDGLPPDESRNVFDGKLYESIRQVTSSLFRELLVSYNNGTSSGRPPITCVITDCMFRFPIDIAEELGIPVFTFSTFSARFLFLFFWIPKLLEDGQLRYPEQELHGVPGAEGLIRCKDLPGFLSDEDVAHWKPINFVNQILATSRSSGLILNTFDELEAPFLTSLSKIYKKIYSLGPINSLLKNFQSQPQYNLWKEDHSCMAWLDSQPPKSVVFVSFGSVVKLTNRQLVEFWNGLVNSGKPFLLVLRSDVIEAGEEVVRENMERKAEGRWMIVSWAPQEEVLAHDAVGGFLTHSGWNSTLESLAAGVPMISWTQIGDQTSNSTWVSKVWRIGLQLEDGFDSFTIETMVRSVMDQTMEKTVAELAERAKNRASKNGTSYRNFQTLIQDITNIIETHI

SEQ ID NO: 133 - protein, 457 aa, Cucurbita moschata 2
MDAQKAVDTPPTTVLMLPWIGYGHLSAYLELAKALSRRNFHVYFCSTPVNLDSIKPNLIPPPPSIQFVDLHLPSSPELPPHLHTTNGLPSHLKPTLHQAFSAAAQHFEAILQTLSPHLLIYDSLQPWAPRIASSLNIPAINFNTTAVSIIAHALHSVHYPDSKFPFSDFVLHDYWKAKYTTADGATSEKTRRGVEAFLYCLNASCDVVLVNSFRELEGEYMDYLSVLLKKKVVSVGPLVYEPSEGEEDEEYWRIKKWLDEKEALSTVLVSFGSEYFPPKEEMEEIAHGLEESEANFIWVVRFPKGEESSSRGIEEALPKGFVERAGERAMVVKKWAPQGKILKHGSIGGFVSHCGWNSVLESIRFGVPVIGAPMHLDQPYNAGLLEEAGIGVEAKRDADGKIQRDQVASLIKQVVVEKTREDIWKKVREMREVLRRRDDDDMMIDEMVAVISVVLKI

SEQ ID NO: 134 - protein, 455 aa, Cucurbita moschata 3
MDAQQAANKSPTASTIFMLPWVGYGHLSAYLELAKALSTRNFHVYFCSTPVSLASIKPRLIPSCSSIQFVELHLPSSDEFPPHLHTTNGLPAHLVPTIHQAFAAAAQTFEAFLQTLRPHLLIYDSLQPWAPRIASSLNIPAINFFTAGAFAVSHVLRAFHYPDSQFPSSDFVLHSRWKIKNTTAESPTQVKIPKIGEAIGYCLNASRGVILTNSFRELEGKYIDYLSVILKKRVLPIGPLVYQPNQDEEDEDYSRIKNWLDRKEASSTVLVSFGSEFFLSKEETEAIAHGLEQSEANFIWGIRFPKGAKKNAIEEALPEGFLERVGGRAMVVEEWVPQGKILKHGNIGGFVSHCGWNSAMESIMCGVPVIGIPMQVDQPFNAGILEEAGVGVEAKRDSDGKIQRDEVAKLIKEVVVERTREDIRNKLEEINEILRTRREEKLDELATEISLLCKN

SEQ ID NO: 135 - protein, 474 aa, Prunus persica
MAMKQPHVIIFPFPLQGHMKPLLCLAELLCHAGLHVTYVNTHHNHQRLANRQALSTHFPTLHFESISDGLPEDDPRTLNSQLLIALKTSIRPHFRELLKTISLKAESNDTLVPPPSCIMTDGLVTFAFDVAEELGLPILSFNVPCPRYLWTCLCLPKLIENGQLPFQDDDMNVEITGVPGMEGLLHRQDLPGFCRVKQADHPSLQFAINETQTLKRASALILDTVYELDAPCISHMALMFPKIYTLGPLHALLNSQIGDMSRGLASHGSLWKSDLNCMTWLDSQPSKSIIYVSFGTLVHLTRAQVIEFWYGLVNSGHPFLWVMRSDITSGDHQIPAELENGTKERGCIVDWVSQEEVLAHKSVGGFLTHSGWNSTLESIVAGLPMICWPKLGDHYIISSTVCRQWKIGLQLNENCDRSNIESMVQTLMGSKREEIQSSMDAISKLSRDSVAEGGSSHNNLEQLIEYIRNLQHQN

SEQ ID NO: 136 - protein, 468 aa, Theobroma cacao
MRQPHVLVLPFPAQGHIKPMLCLAELLCQAGLRVTFLNTHHSHRRLNNLQDLSTRFPTLHFESVSDGLPEDHPRNLVHFMHLVHSIKNVTKPLLRDLLTSLSLKTDIPPVSCIIADGILSFAIDVAEELQIKVIIFRTISSCCLWSYLCVPKLIQQGELQFSDSDMGQKVSSVPEMKGSLRLHDRPYSFGLKQLEDPNFQFFVSETQAMTRASAVIFNTFDSLEAPVLSQMIPLLPKVYTIGPLHALRKARLGDLSQHSSFNGNLREADHNCITWLDSQPLRSVVYVSFGSHVVLTSEELLEFWHGLVNSGKRFLWVLRPDIIAGEKDHNQIIAREPDLGTKEKGLLVDWAPQEEVLAHPSVGGFLTHCGWNSTLESMVAGVPMLCWPKLPDQLVNSSCVSEVWKIGLDLKDMCDRSTVEKMVRALMEDRREEVMRSVDGISKLARESVSHGGSSSSNLEMLIQELET

SEQ ID NO: 137 - protein, 462 aa, Corchorus capsularis
MDSKQKKMSVLMFPWLAYGHISPFLELAKKLSKRNFHTFFFSTPINLNSIKSKLSPKYAQSIQFVELHLPSLPDLPPHYHTTNGLPPHLMNTLKKAFDMSSLQFSKILKTLNPDLLVYDFIQPWAPLLALSNKIPAVHFLCTSAAMSSFSVHAFKKPCEDFPFPNIYVHGNFMNAKFNNMENCSSDDSISDQDRVLQCFERSTKIILVKTFEELEGKFMDYLSVLLNKKIVPTGPLTQDPNEDEGDDDERTKLLLEWLNKKSKSSTVFVSFGSEYFLSKEEREEIAYGLELSKVNFIWVIRFPLGENKTNLEEALPQGFLQRVSERGLVVENWAPQAKILQHSSIGGFVSHCGWSSVMESLKFGVPIIAIPMHLDQPLNARLVVDVGVGLEVIRNHGSLEREEIAKLIKEVVLGNGNDGEIVRRKAREMSNHIKKKGEKDMDELVEELMLICKMKPNSCHLS

SEQ ID NO: 138 - protein, 448 aa, Ziziphus jujube
MMERQRSIKVLMFPWLAHGHISPFLELAKRLTDRNFQIYFCSTPVNLTSVKPKLSQKYSSSIKLVELHLPSLPDLPPHYHTTNGLALNLIPTLKKAFDMSSSSFSTILSTIKPDLLIYDFLQPWAPQLASCMNIPAVNFLSAGASMVSFVLHSIKYNGDDHDDEFLTTELHLSDSMEAKFAEMTESSPDEHIDRAVTCLERSNSLILIKSFRELEGKYLDYLSLSFAKKVVPIGPLVAQDTNPEDDSMDIINWLDKKEKSSTVFVSFGSEYYLTNEEMEEIAYGLELSKVNFIWVVRFPLGQKMAVEEALPKGFLERVGEKGMVVEDWAPQMKILGHSSIGGFVSHCGWSSLMESLKLGVPIIAMPMQLDQPINAKLVERSGVGLEVKRDKNGRIEREYLAKVIREIVVEKARQDIEKKAREMSNIITEKGEEEIDNVVEELAKLCGM

SEQ ID NO: 139 - protein, 446 aa, Vitis vinifera
MDARQSDGISVLMFPWLAHGHISPFLQLAKKLSKRNFSIYFCSTPVNLDPIKGKLSESYSLSIQLVKLHLPSLPELPPQYHTTNGLPPHLMPTLKMAFDMASPNFSNILKTLHPDLLIYDFLQPWAPAAASSLNIPAVQFLSTGATLQSFLAHRHRKPGIEFPFQEIHLPDYEIGRLNRFLEPSAGRISDRDRANQCLERSSRFSLIKTFREIEAKYLDYVSDLTKKKMVTVGPLLQDPEDEDEATDIVEWLNKKCEASAVFVSFGSEYFVSKEEMEEIAHGLELSNVDFIWVVRFPMGEKIRLEDALPPGFLHRLGDRGMVVEGWAPQRKILGHSSIGGFVSHCGWSSVMEGMKFGVPIIAMPMHLDQPINAKLVEAVGVGREVKRDENRKLEREEIAKVIKEVVGEKNGENVRRKARELSETLRKKGDEEIDVVVEELKQLCSY

SEQ ID NO: 140 - protein, 456 aa, Juglans regia
MDTARKRIRVVMLPWLAHGHISPFLELSKKLAKRNFHIYFCSTPVNLSSIKPKLSGKYSRSIQLVELHLPSLPELPPQYHTTKGLPPHLNATLKRAFDMAGPHFSNILKTLSPDLLIYDFLQPWAPAIAASQNIPAINFLSTGAAMTSFVLHAMKKPGDEFPFPEIHLDECMKTRFVDLPEDHSPSDDHNHISDKDRALKCFERSSGFVMMKTFEELEGKYINFLSHLMQKKIVPVGPLVQNPVRGDHEKAKTLEWLDKRKQSSAVFVSFGTEYFLSKEEMEEIAYGLELSNVNFIWVVRFPEGEKVKLEEALPEGFLQRVGEKGMVVEGWAPQAKILMHPSIGGFVSHCGWSSVMESIDFGVPIVAIPMQLDQPVNAKVVEQAGVGVEVKRDRDGKLEREEVATVIREVVMGNIGESVRKKEREMRDNIRKKGEEKMDGVAQELVQLYGNGIKNV

SEQ ID NO: 141 - protein, 456 aa, Hevea brasiliensis
METLQRRKISVLMFPWLAHGHLSPFLELSKKLNKRNFHVYFCSTPVNLDSIKPKLSAEYSFSIQLVELHLPSSPELPLHYHTTNGLPPHLMKNLKNAFDMASSSFFNILKTLKPDLLIYDFIQPWAPALASSLNIPAVNFLCTSMAMSCFGLHLNNQEAKFPFPGIYPRDYMRMKVFGALESSSNDIKDGERAGRCMDQSFHLILAKTFRELEGKYIDYLSVKLMKKIVPVGPLVQDPIFEDDEKIMDHHQVIKWLEKKERLSTVFVSFGTEYFLSTEEMEEIAYGLELSKAHFIWVVRFPTGEKINLEESLPKRYLERVQERGKIVEGWAPQQKILRHSSIGGFVSHCGWSSIMESMKFGVPIIAMPMNLDQPVNSRIVEDAGVGIEVRRNKSGELEREEIAKTIRKVVVEKDGKNVSRKAREMSDTIRKKGEEEIDGVVDELLQLCDVKTNYLQ

SEQ ID NO: 142 - protein, 461 aa, Manihot esculenta
MATAQTRKISVLMFPWLAHGHLSPFLELSKKLANRNFHVYFCSTPVNLDSIKPKLSPEYHFSIQFVELHLPSSPELPSHYHTTNGLPPHLMKTLKKAFDMASSSFFNILKTLNPDLLIYDFLQPWAPALASSLNIPAVNFLCSSMAMSCFGLNLNKNKEIKFLFPEIYPRDYMEMKLFRVFESSSNQIKDGERAGRCIDQSFHVILAKTFRELEGKYIDYVSVKCNKKIVPVGPLVEDTIHEDDEKTMDHHHHHHDEVIKWLEKKERSTTVFVSFGSEYFLSKEEMEEIAHGLELSKVNFIWVVRFPKGEKINLEESLPEGYLERIQERGKIVEGWAPQRKILGHSSIGGFVSHCGWSSIMESMKLGVPIIAMPMNLDQPINSRIVEAAGVGIEVSRNQSGELEREEMAKTIRKVVVEREGVYVRRKAREMSDVLRKKGEEEIDGVVDELVQLCDMKTNYL

SEQ ID NO: 143 - protein, 452 aa, Cephalotus follicularis
MDLKRRSIRVLMLPWLAHGHISPFLELAKKLTNRNFLIYFCSTPINLNSIKPKLSSKYSFSIQLVELHLPSLPELPPHYHTTNGLPLHLMNTLKTAFDMASPSFLNILKTLKPDLLICDHLQPWAPSLASSLNIPAIIFPTNSAIMMAFSLHHAKNPGEEFPFPSININDDMVKSINFLHSASNGLTDMDRVLQCLERSSNTMLLKTFRQLEAKYVDYSSALLKKKIVLAGPLVQVPDNEDEKIEIIKWLDSRGQSSTVFVSFGSEYFLSKEEREDIAHGLELSKVNFIWVVRFPVGEKVKLEEALPNGFAERIGERGLVVEGWAPQAMILSHSSIGGFVSHCGWSSMMESMKFGVPIIAMPMHIDQPLNARLVEDVGVGLEIKRNKDGRFEREELARVIKEVLVYKNGDAVRSKAREMSEHIKKNGDQEIDGVADALVKLCEMKTNSLNQD

SEQ ID NO: 144 - protein, 460 aa, Stevia rebaudiana
MAEQQKIKKSPHVLLIPFPLQGHINPFIQFGKRLISKGVKTTLVTTIHTLNSTLNHSNTTTTSIEIQAISDGCDEGGFMSAGESYLETFKQVGSKSLADLIKKLQSEGTTIDAIIYDSMTEWVLDVAIEFGIDGGSFFTQACVVNSLYYHVHKGLISLPLGETVSVPGFPVLQRWETPLILQNHEQIQSPWSQMLFGQFANIDQARWVFTNSFYKLEEEVIEWTRKIWNLKVIGPTLPSMYLDKRLDDDKDNGFNLYKANHHECMNWLDDKPKESVVYVAFGSLVKHGPEQVEEITRALIDSDVNFLWVIKHKEEGKLPENLSEVIKTGKGLIVAWCKQLDVLAHESVGCFVTHCGFNSTLEAISLGVPVVAMPQFSDQTTNAKLLDEILGVGVRVKADENGIVRRGNLASCIKMIMEEERGVIIRKNAVKWKDLAKVAVHEGGSSDNDIVEFVSELIKA

SEQ ID NO: 145 - protein, 458 aa, Stevia rebaudiana
MENKTETTVRRRRRIILFPVPFQGHINPILQLANVLYSKGFSITIFHTNFNKPKTSNYPHFTFRFILDNDPQDERISNLPTHGPLAGMRIPIINEHGADELRRELELLMLASEEDEEVSCLITDALWYFAQSVADSLNLRRLVLMTSSLFNFHAHVSLPQFDELGYLDPDDKTRLEEQASGFPMLKVKDIKSAYSNWQILKEILGKMIKQTKASSGVIWNSFKELEESELETVIREIPAPSFLIPLPKHLTASSSSLLDHDRTVFQWLDQQPPSSVLYVSFGSTSEVDEKDFLEIARGLVDSKQSFLWVVRPGFVKGSTWVEPLPDGFLGERGRIVKWVPQQEVLAHGAIGAFWTHSGWNSTLESVCEGVPMIFSDFGLDQPLNARYMSDVLKVGVYLENGWERGEIANAIRRVMVDEEGEYIRQNARVLKQKADVSLMKGGSSYESLESLVSYISSL

SEQ ID NO: 146 - protein, 481 aa, Stevia rebaudiana
MDAMATTEKKPHVIFIPFPAQSHIKAMLKLAQLLHHKGLQITFVNTDFIHNQFLESSGPHCLDGAPGFRFETIPDGVSHSPEASIPIRESLLRSIETNFLDRFIDLVTKLPDPPTCIISDGFLSVFTIDAAKKLGIPVMMYWTLAACGFMGFYHIHSLIEKGFAPLKDASYLTNGYLDTVIDWVPGMEGIRLKDFPLDWSTDLNDKVLMFTTEAPQRSHKVSHHIFHTFDELEPSIIKTLSLRYNHIYTIGPLQLLLDQIPEEKKQTGITSLHGYSLVKEEPECFQWLQSKEPNSVVYVNFGSTTVMSLEDMTEFGWGLANSNHYFLWIIRSNLVIGENAVLPPELEEHIKKRGFIASWCSQEKVLKHPSVGGFLTHCGWGSTIESLSAGVPMICWPYSWDQLTNCRYICKEWEVGLEMGTKVKRDEVKRLVQELMGEGGHKMRNKAKDWKEKARIAIAPNGSSSLNIDKMVKEITVLARN

SEQ ID NO: 147 - protein, 485 aa, Stevia rebaudiana
MYNVTYHQNSKAMATSDSIVDDRKQLHVATFPWLAFGHILPFLQLSKLIAEKGHKVSFLSTTRNIQRLSSHISPLINVVQLTLPRVQELPEDAEATTDVHPEDIQYLKKAVDGLQPEVTRFLEQHSPDWIIYDFTHYWLPSIAASLGISRAYFCVITPWTIAYLAPSSDAMINDSDGRTTVEDLTTPPKWFPFPTKVCWRKHDLARMEPYEAPGISDGYRMGMVFKGSDCLLFKCYHEFGTQWLPLLETLHQVPVVPVGLLPPEIPGDEKDETWVSIKKWLDGKQKGSVVYVALGSEALVSQTEVVELALGLELSGLPFVWAYRKPKGPAKSDSVELPDGFVERTRDRGLVWTSWAPQLRILSHESVCGFLTHCGSGSIVEGLMFGHPLIMLPIFCDQPLNARLLEDKQVGIEIPRNEEDGCLTKESVARSLRSVVVENEGEIYKANARALSKIYNDTKVEKEYVSQFVDYLEKNARAVAIDHES

SEQ ID NO: 148 - protein, 473 aa, Stevia rebaudiana
MATSDSIVDDRKQLHVATFPWLAFGHILPYLQLSKLIAEKGHKVSFLSTTRNIQRLSSHISPLINVVQLTLPRVQELPEDAEATTDVHPEDIPYLKKASDGLQPEVTRFLEQHSPDWIIYDYTHYWLPSIAASLGISRAHFSVTTPWAIAYMGPSADAMINGSDGRTTVEDLTTPPKWFPFPTKVCWRKHDLARLVPYKAPGISDGYRMGLVLKGSDCLLSKCYHEFGTQWLPLLETLHQVPVVPVGLLPPEVPGDEKDETWVSIKKWLDGKQKGSVVYVALGSEVLVSQTEVVELALGLELSGLPFVWAYRKPKGPAKSDSVELPDGFVERTRDRGLVWTSWAPQLRILSHESVCGFLTHCGSGSIVEGLMFGHPLIMLPIFGDQPLNARLLEDKQVGIEIPRNEEDGCLTKESVARSLRSVVVEKEGEIYKANARELSKIYNDTKVEKEYVSQFVDYLEKNTRAVAIDHES

SEQ ID NO: 149 - protein, 473 aa, Stevia rebaudiana
MATSDSIVDDRKQLHVATFPWLAFGHILPYLQLSKLIAEKGHKVSFLSTTRNIQRLSSHISPLINVVQLTLPRVQELPEDAEATTDVHPEDIPYLKKASDGLQPEVTRFLEQHSPDWIIYDYTHYWLPSIAASLGISRAHFSVTTPWAIAYMGPSADAMINGSDGRTTVEDLTTPPKWFPFPTKVCWRKHDLARLVPYKAPGISDGYRMGLVLKGSDCLLSKCYHEFGTQWLPLLETLHQVPVVPVGLLPPEIPGDEKDETWVSIKKWLDGKQKGSVVYVALGSEVLVSQTEVVELALGLELSGLPFVWAYRKPKGPAKSDSVELPDGFVERTRDRGLVWTSWAPQLRILSHESVCGFLTHCGSGSIVEGLMFGHPLIMLPIFGDQPLNARLLEDKQVGIEIPRNEEDGCLTKESVARSLRSVVVEKEGEIYKANARELSKIYNDTKVEKEYVSQFVDYLEKNARAVAIDHES

SEQ ID NO: 150 - protein, 462 aa, OsUGT1-2
MDSGYSSSYAAAAGMHVVICPWLAFGHLLPCLDLAQRLASRGHRVSFVSTPRNISRLPPVRPALAPLVAFVALPLPRVEGLPDGAESTNDVPHDRPDMVELHRRAFDGLAAPFSEFLGTACADWVIVDVFHHWAAAAALEHKVPCAMMLLGSAHMIASIADRRLERAETESPAAAGQGRPAAAPTFEVARMKLIRTKGSSGMSLAERFSLTLSRSSLVVGRSCVEFEPETVPLLSTLRGKPITFLGLMPPLHEGRREDGEDATVRWLDAQPAKSVVYVALGSEVPLGVEKVHELALGLELAGTRFLWALRKPTGVSDADLLPAGFEERTRGRGVVATRWVPQMSILAHAAVGAFLTHCGWNSTIEGLMFGHPLIMLPIFGDQGPNARLIEAKNAGLQVARNDGDGSFDREGVAAAIRAVAVEEESSKVFQAKAKKLQEIVADMACHERYIDGFIQQLRSYKD

SEQ ID NO: 151 - protein, 490 aa, Arabidopsis thaliana
MGSISEMVFETCPSPNPIHVMLVSFQGQGHVNPLLRLGKLIASKGLLVTFVTTELWGKKMRQANKIVDGELKPVGSGSIRFEFFDEEWAEDDDRRADFSLYIAHLESVGIREVSKLVRRYEEANEPVSCLINNPFIPWVCHVAEEFNIPCAVLWVQSCACFSAYYHYQDGSVSFPTETEPELDVKLPCVPVLKNDEIPSFLHPSSRFTGFRQAILGQFKNLSKSFCVLIDSFDSLEREVIDYMSSLCPVKTVGPLFKVARTVTSDVSGDICKSTDKCLEWLDSRPKSSVVYISFGTVAYLKQEQIEEIAHGVLKSGLSFLWVIRPPPHDLKVETHVLPQELKESSAKGKGMIVDWCPQEQVLSHPSVACFVTHCGWNSTMESLSSGVPVVCCPQWGDQVTDAVYLIDVFKTGVRLGRGATEERVVPREEVAEKLLEATVGEKAEELRKNALKWKAEAEAAVAPGGSSDKNFREFVEKLGAGVTKTKDNGY

SEQ ID NO: 152 - protein, 481 aa, Arabidopsis thaliana
MGSHVAQKQHVVCVPYPAQGHINPMMKVAKLLYAKGFHITFVNTVYNHNRLLRSRGPNAVDGLPSFRFESIPDGLPETDVDVTQDIPTLCESTMKHCLAPFKELLRQINARDDVPPVSCIVSDGCMSFTLDAAEELGVPEVLFWTTSACGFLAYLYYYRFIEKGLSPIKDESYLTKEHLDTKIDWIPSMKNLRLKDIPSFIRTTNPDDIMLNFIIREADRAKRASAIILNTFDDLEHDVIQSMKSIVPPVYSIGPLHLLEKQESGEYSEIGRTGSNLWREETECLDWLNTKARNSVVYVNFGSITVLSAKQLVEFAWGLAATGKEFLWVIRPDLVAGDEAMVPPEFLTATADRRMLASWCPQEKVLSHPAIGGFLTHCGWNSTLESLCGGVPMVCWPFFAEQQTNCKFSRDEWEVGIEIGGDVKREEVEAVVRELMDEEKGKNMREKAEEWRRLANEATEHKHGSSKLNFEMLVNKVLLGE

SEQ ID NO: 153 - protein, 438 aa, Columba livia
MIHCGKKHICAFVTCILISASILMYSWKDPQLQNNITRKIFQATSALPASQLCRGKPAQNVITALEDNRTFIISPYFDDRESKVTRVIGIVHHEDVKQLYCWFCCQPDGKIYVARAKIDVHSDRFGFPYGAADIVCLEPENCNPTHVSIHQSPHANIDQLPSFKIKNRKSETFSVDFTVCISAMFGNYNNVLQFIQSVEMYKILGVQKVVIYKNNCSQLMEKVLKFYMEEGTVEIIPWPINSHLKVSTKWHFSMDAKDIGYYGQITALNDCIYRNMQRSKFVVLNDADEIILPLKHLDWKAMMSSLQEQNPGAGIFLFENHIFPKTVSTPVFNISSWNRVPGVNILQHVHREPDRKEVFNPKKMIIDPRQVVQTSVHSVLRAYGNSVNVPADVALVYHCRVPLQEELPRESLIRDTALWRYNSSLITNVNKVLHQTVL

SEQ ID NO: 154 - protein, 252 aa, Haemophilus ducreyi
MPTLTVAMIVKNEAQDLAECLKTVDGWVDEIVIVDSGSTDDTLKIATQFNAKVYVNSDWQGFGPQRQFAQQYVTSDYVLWLDADERVTPELKASILQAVQHNQKNTVYKVSRLSEIFGKEIRYSGWYPDYVVRLYPTYLAKYGDELVHEKVHYPADSRVEKLQGDLLHFTYKNIHHYLVKSASYAKAWAMQRAKAGKKASLLDGVTHAIACFLKMYLFKAGFLDGKQGFLLAVLSAHSTFVKYADLWDRTRS

SEQ ID NO: 155 - protein, 252 aa, Neisseria gonorrhoeae
MKKVSVLIVAKNEANHIRECIESCRFDKEVIVIDDHSADNTAEIAEGLGAKVFRRHLNGDFGAQKTFAIEQAGGEWVFLIDADERCTPELSDEISKIVRTGDYAAYFVERRNLFPNHPATHGAMRPDSVCRLMPKKGGSVQGKVHETVQTPYPERRLKHFMYHYTYDNWEQYFNKFNKYTSISAEKYREQGKPVSFVRDIILRPIWGFFKIYILNKGFLDGKMGWIMSVNHSYYTMIKYVKLYYLYKSGGKF

SEQ ID NO: 156 - protein, 309 aa, Rhizobium meliloti
MPNETLHIDIGVCTYRRPELAETLRSLAAMNVPERARLRVIVADNDAEPSARALVEGLRPEMPFDILYVHCPHSNISIARNCCLDNSTGDFLAFLDDDETVSGDWLTRLLETARTTGAAAVLGPVRAHYGPTAPRWMRSGDFHSTLPVWAKGEIRTGYTCNALLRRDAASLLGRRFKLSLGKSGGEDTDFFTGMHCAGGTIAFSPEAWVHEPVPENRASLAWLAKRRFRSGQTHGRLLAEKAHGLRQAWNIALAGAKSGFCATAAVLCFPSAARRNRFALRAVLHAGVISGLLGLKEIEQYGAREVTSA

SEQ ID NO: 157 - protein, 861 aa, Rhizobium radiobacter
MCRCGRAVRSRPVCRPGQLVVRRSPRPRSRNHSRCRPLRLSVFPRPHRRVRHHCQRDLRWEPGRWIAVRWKAARSHRRFRRCPFPRQLVWPVRERHRDAGDRRNQRERRRRDAYHEISEPKFRTRKRTESFWMNKAITVIVWLLVSLCVLAIITMPVSLQTHLVATAISLILLATIKSFNGQGAWRLVALGFGTAIVLRYVYWRTTSTLPPVNQLENFIPGFLLYLAEMYSVVMLGLSLVIVSMPLPSRKTRPGSPDYRPTVDVFVPSYNEDAELLANTLAAAKNMDYPADRFTVWLLDDGGSVQKRNAANIVEAQAAQRRHEELKKLCEDLDVRYLTRERNVHAKAGNLNNGLAHSTGELVTVFDADHAPARDFLLETVGYFDEDPRLFLVQTPHFFVNPDPIERNLRTFETMPSENEMFYGIIQRGLDKWNGAFFCGSAAVLRREALQDSDGFSGVSITEDCETALALHSRGWNSVYVDKPLIAGLQPATFASFIGQRSRWAQGMMQILIFRQPLFKRGLSFTQRLCYMSSTLFWLFPFPRTIFLFAPLFYLFFDLQIFVASGGEFLAYTAAYMLVNLMMQNYLYGSFRWPWISELYEYVQTVHLLPAVVSVIFNPGKPTFKVTAKDESIAEARLSEISRPFFVIFALLLVAMAFAVWRIYSEPYKADVTLVVGGWNLLNLIFAGCALGVVSERGDKSASRRITVKRRCEVQLGGSDTWVPASIDNVSVHGLLINIFDSATNIEKGATAIVKVKPHSEGVPETMPLNVVRTVRGEGFVSIGCTFSPQRAVDHRLIADLIFANSEQWSEFQRVRRKKPGLIRGTAIFLAIALFQTQRGLYYLVRARRPAPKSAKPVGAVK

SEQ ID NO: 158 - protein, 315 aa, Streptococcus agalactiae
MIKKIEKDLISVIVPIYNVEDYLVECIESLIVQTYRNIEILLINDGSTDNCATIAKEFSERDCRVIYIEKSNGGLSEARNYGIYHSKGKYLTFVDSDDKVSSDYIANLYNAIQKHDSSIAIGGYLEFYERHNSIRNYEYLDKVIPVEEALLNMYDIKTYGSIFITAWGKLFHKSIFNDLEFALNKYHEDEFFNYKAYLKANSITYIDKPLYHYRIRVGSIMNNSDNVIIARKKLDVLSALDERIKLITSLRKYSVFLQKTEIFYVNQYFRTKKFLKQQSVMFKEDNYIDAYRMYGRLLRKVKLVDKLKLIKNRFF

SEQ ID NO: 159 - protein, 416 aa, Streptococcus pneumoniae
MYTFILMLLDFFQNHDFHFFMLFFVFILIRWAVIYFHAVRYKSYSCSVSDEKLFSSVIIPVVDEPLNLFESVLNRISRHKPSEIIVVINGPKNERLVKLCHDFNEKLENNMTPIQCYYTPVPGKRNAIRVGLEHVDSQSDITVLVDSDTVWTPRTLSELLKPFVCDKKIGGVTTRQKILDPERNLVTMFANLLEEIRAEGTMKAMSVTGKVGCLPGRTIAFRNIVERVYTKFIEETFMGFHKEVSDDRSLTNLTLKKGYKTVMQDTSVVYTDAPTSWKKFIRQQLRWAEGSQYNNLKMTPWMIRNAPLMFFIYFTDMILPMLLISFGVNIFLLKILNITTIVYTASWWEIILYVLLGMIFSFGGRNFKAMSRMKWYYVFLIPVFIIVLSIIMCPIRLLGLMRCSDDLGWGTRNLTE

SEQ ID NO: 160 - protein, 482 aa, MbUGTc13
MADAMATTEKKPHVIFIPFPAQSHIKAMLKLAQLLHHKGLQITFVNTDFIHNQFLESSGPHCLDGAPGFRFETIPDGVSHSPEASIPIRESLLRSIETNFLDRFIDLVTKLPDPPTCIISDGFLSVFTIDAAKKLGIPVMMYWTLAACGFMGFYHIHSLIEKGFAPLKDASYLTNGYLDTVIDWVPGMEGIRLKDFPLDWSTDLNDKVLMFTTEATQRSHKVSHHIFHTFDELEPSIIKTLSLRYNHIYTIGPLQLLLDQIPEEKKQTGITSLHGYSLVKEEPECFQWLQSKEPNSVVYVNFGSTTVMSLEDMTEFGWGLANSNHYFLWIIRSNLVIGENAVLPPELEEHIKKRGFIASWCSQEKVLKHPSVGGFLTHCGWGSTIESLSAGVPMICWPYSWDQLTNCRYICKEWEVGLEMGTKVKRDEVKRLVQELMGEGGHKMRNKAKDWKEKARIAIAPNGSSSLNIDKMVKEITVLARN

SEQ ID NO: 161 - protein, 463 aa, MbUGTc19
MANHHECMNWLDDKPKESVVYVAFGSLVKHGPEQVEEITRALIDSDVNFLWVIKHKEEGKLPENLSEVIKTGKGLIVAWCKQLDVLAHESVGCFVTHCGFNSTLEAISLGVPVVAMPQFSDQTTNAKLLDEILGVGVRVKADENGIVRRGNLASCIKMIMEEERGVIIRKNAVKWKDLAKVAVHEGGSSDNDIVEFVSELIKAGSGEQQKIKKSPHVLLIPFPLQGHINPFIQFGKRLISKGVKTTLVTTIHTLNSTLNHSNTTTTSIEIQAISDGCDEGGFMSAGESYLETFKQVGSKSLADLIKKLQSEGTTIDAIIYDSMTEWVLDVAIEFGIDGGSFFTQACVVNSLYYHVHKGLISLPLGETVSVPGFPVLQRWETPLILQNHEQIQSPWSQMLFGQFANIDQARWVFTNSFYKLEEEVIEWTRKIWNLKVIGPTLPSMYLDKRLDDDKDNGFNLYKA

SEQ ID NO: 162 - protein, 458 aa, MbUGT1-3; identical to SEQ ID NO: 145

SEQ ID NO: 163 - protein, 463 aa, MbUGT1-2
MATKGSSGMSLAERFWLTLSRSSLVVGRSCVEFEPETVPLLSTLRGKPITFLGLMPPLHEGRREDGEDATVRWLDAQPAKSVVYVALGSEVPLGVEKVHELALGLELAGTRFLWALRKPTGVSDADLLPAGFEERTRGRGVVATRWVPQMSILAHAAVGAFLTHCGWNSTIEGLMFGHPLIMLPIFGDQGPNARLIEAKNAGLQVARNDGDGSFDREGVAAAIRAVAVEEESSKVFQAKAKKLQEIVADMACHERYIDGFIQQLRSYKDDSGYSSSYAAAAGMHVVICPWLAFGHLLPCLDLAQRLASRGHRVSFVSTPRNISRLPPVRPALAPLVAFVALPLPRVEGLPDGAESTNDVPHDRPDMVELHRRAFDGLAAPFSEFLGTACADWVIVDVFHHWAAAAALEHKVPCAMMLLGSAEMIASIADERLEHAETESPAAAGQGRPAAAPTFEVARMKLIR

SEQ ID NO: 164 - protein, 452 aa, Coffea arabica
MAENHATFNVLMLPWLAHGHVSPYLELAKKLTARNFNVYLCSSPATLSSVRSKLTEKFSQSIHLVELHLPKLPELPAEYHTTNGLPPHLMPTLKDAFDMAKPNFCNVLKSLKPDLLIYDLLQPWAPEAASAFNIPAVVFISSSATMTSFGLHFFKNPGTKYPYGNAIFYRDYESVFVENLTRRDRDTYRVINCMERSSKIILIKGFNEIEGKYFDYFSCLTGKKVVPVGPLVQDPVLDDEDCRIMQWLNKKEKGSTVFVSFGSEYFLSKKDMEEIAHGLEVSNVDFIWVVRFPKGENIVIEETLPKGFFERVGERGLVVNGWAPQAKILTHPNVGGFVSHCGWNSVMESMKFGLPIIAMPMHLDQPINARLIEEVGAGVEVLRDSKGKLHRERMAETINKVMKEASGESVRKKARELQEKLELKGDEEIDDVVKELVQLCATKNKRNGLHYY

SEQ ID NO: 165 - protein, 484 aa, Stevia rebaudiana
MADQMAKIDEKKPHVVFIPFPAQSHIKCMLKLARILHQKGLYITFINTDTNHERLVASGGTQWLENAPGFWFKTVPDGFGSAKDDGVKPTDALRELMDYLKTNFFDLFLDLVLKLEVPATCIICDGCMTFANTIRAAEKLNIPVILFWTMAACGFMAFYQAKVLKEKEIVPVKDETYLTNGYLDMEIDWIPGMKRIRLRDLPEFILATKQNYFAFEFLFETAQLADKVSHMIIHTFEELEASLVSEIKSIFPNVYTIGPLQLLLNKITQKETNNDSYSLWKEEPECVEWLNSKEPNSVVYVNFGSLAVMSLQDLVEFGWGLVNSNHYFLWIIRANLIDGKPAVMPQELKEAMNEKGFVGSWCSQEEVLNHPAVGGFLTHCGWGSIIESLSAGVPMLGWPSIGDQRANCRQMCKEWEVGMEIGKNVKRDEVEKLVRMLMEGLEGERMRKKALEWKKSATLATCCNGSSSLDVEKLANEIKKLSRN

SEQ ID NO: 166 - protein, 384 aa, Flavobacteriales bacterium
MLNNSLFSRLEEIPALLKLKLGSKDYYKNNNSETLTCDNLRYCFDTLNKVSRSFATVIKQLPNELGNNVCVFYLILRALDSIEDDMNLPKELKIKLLREFHKKNYESGWNISGVGDKKEHVELLENYDKVIQSFLAIDQKNQLIITDICRKVGAGMANFVKAEIESVEDYNLYCHHVAGLVGIGLSRMFISSGLENDDFLNQDEISNSMGLFLQKTNIVRDYREDLDEGRMFWPKDIWHVYGSKINDFAINPTHDQSVLCLNHMLNNALTHATDCLAYLKHLRNENIFKFCAIPQVMAMATLCKIYSNPDVFIKNVKIRKGLAAKLILNTTSMDEVIKVYKDMLLVIESKISSDNNPVSAETIQLLKQIREYFNDETLIVRKIA

SEQ ID NO: 167 - protein, 383 aa, Bacteroidetes bacterium
MLNSSLFSRLEEIPALLKLKLGSINNYKNNNSENLTSKNLRYCFDTLNKVSRSFASVIKQLPNELMVNVCLFYLILRALDSIEDDMNLPKDFKINLLREFLDKNYEPGWKISGVGDKKEYVELLENYDKVIQVFLDIDPKNQLIITDICRKMGAGMAHFVEAEINSVKDYNLYCYHVAGLVGIGLSKMFLASGLENCDYLNQEEISSSMGLFLQKTNIVRDYKEDMEENRIFWPKEIWRTYASKFSDFSINPQHETSISCLNHMVNDALGHVIDCLEYLRHLRNENIFKFCAIPQVMAMATLCKVYNNPDVFIKTVKIRKGLAAKLILNTTSMDEVIKVYKGLLLDIENKIPLHNPTSDETLRLIKNIRSYCNNETMVVSKTA

SEQ ID NO: 168 - protein, 458 aa, Bathymodiolus azoricus Endosymbiont
MHTTSEHNDLFDICIVGAGMAGATIATYLAPRGIKIALIDRDYAEKRRIVGELLQPGAVQTLKKMGLEHLLEGFDAQPIYGYALFNKDCEFSIEYNQDKSTNYRGVGLHNGRFLQKIREDALKQPSITQIHGTVSELIEDENHVVTGVKYKEKYTRELKTVNAKLTITSDGFFSSFRKDLTNNVKTVTSFFVGIILKDCELPYPHHGHVFLSAPTPFICYPISSTESRLLIDFPGDQAPKKEAVKHHIENNVIPFLPKEFRLCLDQALRENDYKIMPNHYMPAKPVLKKGVVLLGDALNMRHPITGGGLTAVFNDVYLLSTHLLAMPDFNDTKLIHEKVNLYYNDRYHANTNVNIMANALYGVMSNDLLKQSVFEYLRKGGDNSGGPISLLAGLNRNPTILIKHFFSVALLCLRNLFKAHKMSLTNAFYVIKDAFCIIVPLAINELRPSSFLKKNIHN

SEQ ID NO: 169 - protein, 458 aa, Methyloprofundus sediment
MNTSPEHNDLFDICIVGVGMAGATIAAYLAPRGLKIALIDREYTEKRRIVGELLQPGAVQTLKKMGLEHLLEGFDAQPIYGYALFNNDKEFSISYNSDDSTEYHGVGLHNGRFLQKIREDVFKNETVTQIHGTVSELIEDKKGVVKGVTYREKHTREYKTVKAKLTVTSDGFFSNFRKDLSNNVKTVTSFFIGLVLNDCNLPFPNHGHVFLSAPTPFICYPISSTETRLLIDYPGDKAPKKDEIREHILNKVAPFLPEEFKECFANAMEDDDFKVMPNHYMPAKPVLKEGAVLLGDALNMRHPLTGGGLTAVFNDVYLLSTHLLAMPDFNDPKLLHEKLELYYQDRYHANTNVNIMANALYGVMSNDLLKQGVFEYLRKGGDNSGGPITLLAGLNRNPTLLIKHFFSVAFLCICNLSGNNKMNFTNVFRVMKDAFCIIKPLAVNELRPSSFYKKNIQL

SEQ ID NO: 170 - protein, 448 aa, Methylomicrobium buryatense
MESNFDICIIGAGMAGATIAAYLAPKGINIALIDHCYKEKKRIVGELLQPGAVLSLEQLGLGHLLDGIDAQPVEGYALLQGNEQTTIPYPSPNHGMGLHNGRFLQQIRASALQNSSVTQIQGKALSLLENEQNEIIGVNYRDSVSNEIKSIYAPLTITSDGFFSNFRELLSNNEKTVTSYFIGLILKDCEIPVPKHGHVFLSGPTPFICYPISSNEVRLLIDFPGGQFPRKAFLQAHLETNVTPYIPEGMQTSYRHALQEDRLKVMPNHYMAAKPKIRKGAVMLGDALNMRHPLTGGGLTAVFSDIEILSGHLLAMPDFNNNDLIYQKIEAYYRDRQYANANLNILANALYGVMSNELLKNSVFKYLQRGGVNAKESIAILAGLNKNHYSLMKQFFFVALFGAYTLVRENITNLPKATKILSDALTIIKPLAKNELSLVGIFSDYFKR

SEQ ID NO: 171 - protein, 474 aa, Cucurbita pepo subsp. pepo
MWAIVVGLATLAVAYYIHWINKWKDSKFNGVLPPGTMGLPLVGETLQLARPSDSLDVHPFIKKKVKRYGPIFKTCLAGRPVVVSTDAEFNNYIMLQEGRAVEMWYLDTLSKFFGLDTEWLKALGFIHKYIRSITLNHFGAESLRERFLPRIEESAKETLRYWATQPSVEVKDSAAVMVFRTSMVKMVSEDSSKLLTGGLTKKFTGLLGGFLTLPINVPGTTYNKCMKDMKEIQKKLREILEGRLASGGGSDEDFLGQAIKDKGSQQFISDDFIIQLLFSISFASFESISTTLTLVLNYLADHPDVVKELEAEHEAIRNARADPDGPITWEEYKSMTFTLHVIFETLRLGSVTPALLRKTTKELQINGYTIPEGWTVMLVTASRHRDPAVYKDPHTFNPWRWKELDSITIQKNFMPFGGGLRHCAGAEYSKVYLCTFLHILFTKYRWTKLKGGKVARAHILSFEDGLHVKFTPKE

SEQ ID NO: 172 - protein, 512 aa, Capsella rubella
MATLMTIDLQNCFIFIILSLLCYYLLFKKQKGSRAGCVLPPSPPSLPIIGHLHLLLSNLTHKSLQNISTKFGSFLYLRVVNLPIVLVSSPSVAYEIYKTHDVNVSSRVATSLGDSLFLGSSGFITAPYGDYWKFMKKMVATKLLRPQAIEQSRGGRAEELQMFYENLLDKAMKKESIEVSKEAMKLTNNIICRMSMGRSCSDENGEAERVRELLVKSTALTKKIFFANMFPRIPLFKKEIMGVSSEFDDLLERLLVEHEERVEEHENKDMMDLLLEAYRDENAEYKISRKQIKSLFVEIFLGGTDTSAQTVQWILAELINKPNILERIREEIDSVVGKSRLMKETDLPNLPYLQATVKEGLRMHPPSPLLVRTFQESCEVKGFYMPEKTMLVINVYALMRDPDTWEDPNEFKPERFLLSSRSRQEDEKEQGMMKYLPFGAGRRGCPGSNLAYLFVGIAVGVMVQCFDWKIKEDKVNMEETTAGMNLAMAHPFKCTPVVRNDPLTLNLENPSS

SEQ ID NO: 173 - protein, 498 aa, Brassica rapa
MIVDFQNCSIFILLCFFTFLCYSVFFFFKKTNDLGPSPPSLPIIGHLHHFLSGLPHKAFQKISTKYGPLLHLHIFSFPIVLVSSPTMAHEIFTTHDLNISSRNTPAIDESLLFGPSGFTVAPYGDYVKFIKKLLATKLLRPRAIEKSRGVRAEELKQFYLKVQDKALKKESIEIGKETMKFTNNMICRMSIGRSFSEENGEVETLRELIIKSFALSKQILFVNVLRRPLEMLGLMSLFKKDIMDVSRGFDELLERVLAEHEEKREEDQDMDMMDLLLEACRDENAEYKITRNQIKSLFVEIFLGGTDTSAHTTQWTMAELVNNPNILGRLRDEIDLVVGKERLIQETDLPNLPYLQAVVKEGLRLHPPAPLLVRMFDKKCVIKDFFKVPEKTTLVVNVYGVMRDPDSWEDPNEFKPERFLTSKQEEDKVLKYLPFAAGRRGCPATNVGYIFVGISIGMMVQCFDWSIKEKVSMEEVYAGMSLSMAHPPTCTPVSRLSL

SEQ ID NO: 174 - protein, 502 aa, Siraitia grosvenorii
MDFFSAFLLLLLTVLILLQIRTRRRNLPPSPPSLPIIGHLHLLKRPIHRNFHKIAAEYGPIFSLRFGSRLAVIVSSLDIAEECFTKNDLIFANRPRLLISKHLGYNCTTMATSPYGDHWRNLRRLAAIEIFSTARLNSSLSIRKDEIQRLLLKLHSGSSGEFTKVELKTMFSELAFNALMRIVAGKRYYGDEVSDEEEAREFRGLMEEISLHGGASHWVDFMPILKWIGGGGFEKSLVRLTKRTDKFMQALIEERRNKKVLERKNSLLDRLLELQASEPEYYTDQIIKGLVLVLLRAGTDTSAVTLNWAMAQLLNNPELLAKAKAELDTKIGQDRPVDEPDLPNLSYLQAIVSETLRLHPAAPMLLSHYSSADCTVAGYDIPRGTTLLVNAWAIHRDPKLWDDPTSFRPERFLGAANELQSKKLIAFGLGRRSCPGDTMALRFVGLTLGLLIQCYQWKKCGDEKVDMGEGGGITIHKAKPLEAMCKARPAMYKLLLNALDKI

SEQ ID NO: 175 - protein, 514 aa, Camelina sativa
MATMMIFDFQNCFIFIILCFVSLLCYTILFKKQESSRTGCVLPPSPPSLPIIGHLHLLLSSLTHKSLHNISSKFGPFLYLRVVNLPIVLVSSASVAYEIYKTQDVNVSSRVATSLGDSLFLGSSGFITAPYGDYWKFMKKMVATKLLRPQAIEQSRGGRAEELQGLYENLLDKAMKKESIEISKEAMKFTNNIICRMSMGRSCSDENGEAEIVRELLVKSTALTKKIFFANMFPRIPLFKKEIMGVSNQFDELLERLLVEHEERVEEHENKDMMDLLLEAFRDEHAEYKISRKQIKSLFVEIFLGGTDTSAQTVQWIMAELINKPSIIEKIREEIDSVVGKTRLIKETDLPKLPYLQVVVKEGLRMHPPSPLVVRTFQESCEVKGFYMPEKTMLVINVYALMRDPESWEDPNEFKPERFLPSSKSRQDEEKEQGLKYLPFGAGRRGCPGSNLAYLFVGLAVGVMVQCFDWKIKEDKVNMEETTAGMNLAMAHPFKCTPVVRIDPLTFNLKSPSP

SEQ ID NO: 176 - protein, 499 aa, Raphanus sativus
MAPMTIDFQTCFIFILLSFFSFFCYFFFFKKTNDLGPSPPSLPIIGHLHHFLSVLPHKAFQQISTKYGPLLHLRIFSFPIVLVSSATMAYEIFTTHDLNISSRNAPAIDESLVFGSSGFIVSPYGDYVKFIKKLLATKLLRPRAIEKSRGVRAEELKQFYLKLHDKALKKESIEIGNETMKFTNNMICGMSMGRSCSEENGETETVRGLINKSFALSRKILFVNVLRRPLEKLGLLSLFKKDILDVSNRFDELLERILLEHEEKPEEEQDMDMMDLLLEASRDENAEYKITRNQIKALFVEIFMGGTDTSAHTTQWTMAELVNNPNSLEKLRDEIDMVVGKSRLIQETDLPNLPYLQAVVKEGLRLHPPAPLLVRMFEKKCVIKDFFNVPEKTTLVVNLYGVMRDPDSWEDPNEFKPERFLTSKQEEEKTLKYLPFAAGRRGCPATNVAYIFVGISIGMMVQCFDWSIKDKVSMEEVYAGMSLSMAHPPKFTPVSRLSL

SEQ ID NO: 177 - protein, 522 aa, Ononis spinosa
MVDPYAVGWIICSLTTIVALYNFVFYRQNRSDKTTPTTTENITTATGDCRSLNPNGDVDIVIVGAGVAGSALAYTLGKDGRRVLVIERDLNEPDRIVGELLQPGGYLKLIELGLEDCVEKIDAQQVFGYALFKDGKHTRLSYPLEKFHSDIAGRSFHNGRFIQRMREKAASLPNVQLVQGTVTSLLEENGTIKGVQYKTKDAQELSACAPLTIVCDGCFSNLRRNLCNPKVEVPSCFVGLVLENCELPCANHGHVILGDPSPVLFYPISSTEIRCLVDVPGQKVPSISNGEMAKYLKEVVAPQVPPELHDAFIAAVDKGNIRTMPNRSMPAAPYPTPGALLMGDAFNMRHPLTGGGMTVALSDIVVLRNLLKPLRDLNDAPSLCKYLESFYTLRKPVASTINTLAGALYKVFCASPDPARKEMRQACFDYLSLGGLFSEGPVSLLSGLNPRPLSLVLHFFAVAIYGVGRLLLPFPSPKRIWIGVRLIASASGIILPIIKAEGIRQMFFPATVPAYYRTPPAA

SEQ ID NO: 178 - protein, 525 aa, Ononis spinosa
MDLYLLGWILSSVLSLFALYCLVFDGNRSRANAEKQIQRGYSVTTDAGDVKSEKLNGDADVIIVGAGIAGAALAHTLGKDGRRVRVIERDLSEPDRIVGELLQPGGYLKLVELGLADCVDNIDAQKVFGYALFKDGKHTRLSYPLEKFHADVSGRSFHNGRFIQRMREKAASLLNVNLEQGTVTSLLEEKGTIKGVQYKNKDGQELTAYAPLTIVCDGCFSNLRRSLCNPKVDNPSCFVGLVLENCELPCANHGHVILGDPSPILFYPISSTEIRCLVDVPGQKVPSISNGDMTKYLKLTVAPQVPPELYDAFIAAVDKGNIRTMPNKSMPADPCPTPGAVLMGDAFNMRHPLTGGGMTVALSDIVVLRNLLRPLRDLNDAPALCKYLESFYTLRKPVASTINTLAGALYKVFSSSPDQARREMRQACFDYLSLGGLFSEGPISLLSGLNPRPLSLVLHFFAVAVFGVGRLLLPFPSPKRVWIGARLLSAASGIILPIIKAEGIRQMFFPVTVPAYYRAPPTSQE

SEQ ID NO: 179 - protein, 519 aa, Medicago truncatula
MIDPYGFGWITCTLITLAALYNFLFSRKNHSDSTTTENITTATGECRSFNPNGDVDIIIVGAGVAGSALAYTLGKDGRRVLIIERDLNEPDRIVGELLQPGGYLKLIELGLDDCVEKIDAQKVFGYALFKDGKHTRLSYPLEKFHSDIAGRSFHNGRFILRMREKAASLPNVRLEQGTVTSLLEENGTIKGVQYKTKDAQEFSACAPLTIVCDGCFSNLRRSLCNPKVEVPSCFVGLVLENCELPCADHGHVILGDPSPVLFYPISSTEIRCLVDVPGQKVPSISNGEMAKYLKTVVAPQVPPELHAAFIAAVDKGHIRTMPNRSMPADPYPTPGALLMGDAFNMRHPLTGGGMTVALSDIVVLRNLLKPLRDLNDASSLCKYLESFYTLRKPVASTINTLAGALYKVFCASPDPARKEMRQACFDYLSLGGLFSEGPVSLLSGLNPCPLSLVLHFFAVAIYGVGRLLLPFPSPKRLWIGIRLIASASGIILPIIKAEGIRQMFFPATVPAYYRAPPDA

SEQ ID NO: 180 - protein, 525 aa, Medicago truncatula
MDLYNIGWILSSVLSLFALYNLIFAGKKNYDVNEKVNQREDSVTSTDAGEIKSDKLNGDADVIIVGAGIAGAALAHTLGKDGRRVHIIERDLSEPDRIVGELLQPGGYLKLVELGLQDCVDNIDAQRVFGYALFKDGKHTRLSYPLEKFHSDVSGRSFHGRFIQRMREKAASLPNVNMEQGTVISLLEEKGTIKGVQYKNKDGQALTAYAPLTIVCDGCFSNLRRSLCNPKVDNPSCFVGLILENCELPCANHGHVILGDPSPILFYPISSTEIRCLVDVPGTKVPSISNGDMTKYLKTTVAPQVPPELYDAFIAAVDKGNIRTMPNRSMPADPRPTPGAVLMGDAFNMRHPLTGGGMTVALSDIVVLRNLLKPMRDLNDAPTLCKYLESFYTLRKPVASTINTLAGALYKVFSASPDEARKEMRQACFDYLSLGGLFSEGPISLLSGLNPRPLSLVLHFFAVAVFGVGRLLLPFPSPKRVWIGARLLSGASGIILPIIKAEGIRQMFFPATVPAYYRAPPVNAF

SEQ ID NO: 181 - protein, 461 aa, Hypholoma sublateritium
MSKSRSNYDVIIVGAGIAGCALAHGLSTLSRATPLRIAIVERSLAEPDRIVGELLQPGGVMALQRLGMEGCLEGIDAVKVHGYCVVENGTSVHIPYPGVHEGRSFHHGRFIMKLREAARAARGVELVEATVTELIPREGGKGIAGVRVARKGKDGEEDTTEALGAALVVVADGCFSNFRAAVMGGAAVKPETKSHFVGAILKDARLPIPNHGTVALVKGFGPVLLYQISEHDTRMLVDVKAPLPADLKVCAHILSNIVPQLPAALHLPIQRALDAERLRRMPNSFLPPVEQGATRGAVLVGDAWNMRHPLTGGGMTVALNDVVVLRDLLGSVGDLGDWRQVASTVNILSVALYDLFGADGELQVLRTGCFKYFERGGDCIDGPVSLLSGIAPSPMLLAYHFFSVAFYSIYVIAVGAQNGSAKQVLAVPGALQYPALCVKGLRVFYTACVVFGPLLWTELRW

SEQ ID NO: 182 - protein, 498 aa, Hypholoma sublateritium
MHPTHYDVVIVGAGVAGSSLAHALATLPREKPLQIALIERSFEEPDRIVGELLQPGGVDALKTLKMTSSVEGIDAITVTGYILVESGDMVRIPYPKGKEGRSFHHGRFIMGLRRVALENPNVHPIEATAADLIECPCTGQVIGVRATSKTAPAPSSIDAQQTPPAPFSVYGDLVIVADGCFSNFRNVVMGKAACKATTKSYFVGTILKDAVLPVAGHGTVILPQGSGPVLLYQISEHDTRMLIDIQHPLPSDLRAHILTNILPQLPASIQGVVSDAFTKDRIRRMPNSFLPSVQQGSPLSKKGVILLGDSWNMRHPLTGGGMTVALNDVVYLRSIFASIQNLDDWDEIRYALRHWHWGRKPLSSTINILSGTLYGLFEKDDDDYRALRKGCFKYFQLGGKCIDDPVSLLSGLSPSPLLLSSHFFAVILYAIWVVFTHPRVGSSMSANPADVKRVYDIPSADEYPQLTLKGIRMFSQACGVFLPVLWSEIRWWAPCESS

SEQ ID NO: 183 - protein, 524 aa, Hypholoma sublateritium
MSKSRSNYDVIIVGAGIAGCALAHGLSTLSRATPLRIAIVERSLAEPDRIVGELLQPGGVMALQRLGMEGCLEGIDAVKVHGYCVVENGTSVHIPYPGVHEGRSFHHGRFIMKLREAARAARGVELVEATVTELIPREGGKGIAGVRVARKGKDGEEDTTEALGAALVVVADGCFSNFRAAVMGGAAVKPETKSHFVGAILKDARLPIPNHGTVALVKGFGPVLLYQISEHDTRMLVDVKAPLPADLKAHILSNIVPQLPAALHLPIQRALDAERLRRMPNSFLPPVEQGATRGAVLVGDAWNMRHPLTGGGMTVALNDVVVLRDLLGSVGDLGDWRQVRRALHRWHWDRKPLASTVNILSVALYDLFGADGEELQVLRTGCFKYFERGGDCIDGPVSLLSGIAPSPMLLAYHFFSVAFYSIYVMFAHPQPVAQSKAVGAQNGSAKQVLAVPGALQYPALCVKGLRVFYTACVVFGPLLWTELRWWTAAEASRGRLLVMSLVPLLLLLGAANYGIPGMGLLGVL

SEQ ID NO: 184 - protein, 317 aa, Gossypium raimondii
MAEKIEHTTVTTNGIKMHVASIGSGPIILFLHGFPELWYTWRHQLLSLSSLGYRCVAPDLRGYGDSDAPPSPESYTVFHIVGDLVGLLDALGVDKVFLVGHDWGAMIAWNFCLFRPDRIKALVNLSIPYHPRNPKVKTVDGYRALFGDDFYICRFQVPGEAEAHFAQMDTAKVMKKFLTTRDPNPPCIPRETGLKALPDPPALPSWLSEDEINYFATKFSQKGFTGGLNYYRAMNLNWELMAPWTGLQIQVPVKFIVGDLDITYHIPGVKEYLQNGGFKKNVPFLQELVVMEGVAHFINQEKPQEISMHIYDFIKKF

SEQ ID NO: 185 - protein, 317 aa, Gossypium hirsutum
MAEKIEHTTVTTNGIKMHVASIGSGPIILFLHGFPELWYTWRRQLLSLSSLGYRCVAPDLRGYGDSDAPPSPESYTVFHVVGDLVGLLDALGVDKVFLVGHDWGAMIAWNFCLFRPDRIKALVNLSVPYHPRNPKVKTVDGYRALFGDDFYICRFQVPGEAEAHFAQMDTAKVLKKFLTTRDPNPPCIPKETGLKALPDPPALPSWLSEDEINYFATKFNQKGFTGGLNYYRAMNLNWELMAPWTGLQIQVPVKFIVGDLDITYHIPGVKEYLQNGGFKKNVPFLQELVVMEGVAHFINQEKPQEISMHIYDFVKKF

SEQ ID NO: 186 - protein, 317 aa, Siraitia grosnevorii
MAENIEHTTVQTNGIKMHVAAIGTGPPVLLLHGFPELWYSWRHQLLYLSSAGYRAIAPDLRGYGDTDAPPSPSSYTALHIVGDLVGLLDVLGIEKVFLIGHDWGAIIAWYFCLFRPDRIKALVNLSVQFFPRNPTTPFVKGFRAVLGDQFYMVRFQEPGKAEEEFASVDIREFFKNVLSNRDPQAPYLPNEVKFEGVPPPALAPWLTPEDIDVYADKFAETGFTGGLNYYRAFDRTWELTAPWTGARIGVPVKFIVGDLDLTYHFPGAQKYIHGEGFKKAVPGLEEVVVMEDTSHFINQERPHEINSHIHDFFSKFC

SEQ ID NO: 187 - protein, 316 aa, Cucumis melo
MADKIQHSTISTNGINIHFASIGSGPVVLFLHGFPELWYSWRHQLLFLASKGFRAIAPDLRGFGDSDAPPSPSSYTPHHIVGDLIGLLDHLGIDQVFLVGHDWGAMMAWYFCLFRPDRVKALVNLSVHYTPRNPAGSPLAVTRRYLGDDFYICKFQEPGVAEADFGSVDTATMMKKFLTMRDPRPAIIPNGFKTLLETPEILPSWLTEEDIEYFASKFSKTGFTGGFNYYRALDITWELTGPWSRAQIKVPTKFIVGDLDLVYNFPGAKEYIHGGGFKKDVPLLEDVVVIEGAAHFINQEKPDEISSLIYDFITKF

SEQ ID NO: 188 - protein, 325 aa, Cucumis melo
MAEKIEHTTIPTNGINMHVASIGSGPAVLFLHGFPQLWYSWRHQLLFLASKGFRALAPDLRGFGDTDAPPSPSSYTFLHIIGDLIGLLDHLGLEKVFLVGHDWGAMIAWYFCLFRPDRVKALVNLSVYYIKRHPSISFVDGFRAVAGDNFYICQFQEAGVAEADFGRVDTATMMKKFMGMRDPEAPLIFTKEKGFSSMETPDPLPCWLTEEDIDFFATKFSKTGFTGGFNYYRALNLSWELTAAWNGSKIEVPVKFIVGDLDLVYHFPGAKQYIHGGEFKKDVPFLEEVVVIKDAAHFIHQEKPHQINSLIYHFINKFSTSTSPA

SEQ ID NO: 189 - protein, 316 aa, Trema orientale
MAEKIEHTTINTNGVNLHVASIGTGPAVLFLHGFPELWYSWRHQMLALSSLGYRAIAPDLRGYGDSDAPPSPESYSSLHIVGDLVGLIDQLGIDQIFLVGHDWGAVIAWQFCLFRPDRVKALVNMSVPFRPRHPTRKPIETFRALFGDDYYVCRFQAPGEVEEDFASDDTANLLKKFYGGRNPRPPCVPKEIGFKGLKAPELPSWLSEEDLNYFAEKFNQRGFTGGLNYYRALDLTWELTAAWTGVQVKVPTKFIVGDLDITYHIPGAKEYINEGGLKKDVPYLQEVVVMEGVAHFVNQEKAEEVSAHIHDFIKKF

SEQ ID NO: 190 - protein, 318 aa, Arachis hypogaea
MAEKIEHTWVNTNGIKMHVASIGSGPAVLFLHGFPELWYSWRHQLLSLSAQGYRCIAPDLRGYGDTDAPPSPSSYSALHIVSDLVGLLDALRIDQVFLVGHDWGAAMAWYFCLFRPDRIKALVNMSVVFRPRNPKWKPLQSLRAMLGDDYYICRFQKPGEAEEEFARAGTSRIIKTFLVSRDPRPPCVPKEIGFGGSPNLQLALPSWLTEEDVNYYASKFDQKGFTGGLNYYRAIDLTWELTAPWTGVQIKVPVKFIVGDLDVTYNTPGVKEYIHGGGFKKEVPFLQELVVMEGVAHFINQERPDEISAHIHDFIKKF

SEQ ID NO: 191 - protein, 757 aa, Pisum sativum cycloartenol synthase
MAWKLKVAEGGTPWLRTLNNHVGRQVWEFDPHSGSPQDLDDIETARRNFHDNRFTHKHSDDLLMRLQFAKENPMNEVLPKVKVKDVEDVTEEAVATTLRRGLNFYSTIQSHDGHWPGDLGGPMFLMPGLVITLSVTGALNAVLTDEHRKEMRRYLYNHQNKDGGWGLHIEGPSTMFGSVLCYVTLRLLGEGPNDGEGDMERGRDWILEHGGATYITSWGKMWLSVLGVFEWSGNNPMPPEIWLLPYALPVHPGRMWCHCRMVYLPMSYLYGKRFVGPITPTVLSLRKELFTVPYHDIDWNQARNLCAKEDLYYPHPLVQDILWATLHKFVEPVFMNWPGKKLREKAIKTAIEHIHYEDENTRYICIGPVNKVLNMLCCWVEDPNSEAFKLHLPRIYDYLWVAEDGMKMQGYNGSQLWDTAFAAQAIISTNLIDEFGPTLKKAHAFIKNSQVSEDCPGDLSKWYRHISKGAWPFSTADHGWPISDCTAEGLKAVLLLSKIAPEIVGEPLDSKRLYDAVNVILSLQNENGGLATYELTRSYTWLEIINPAETFGDIVIDCPYVECTSAAIQALATFGKLYPGHRREEIQCCIEKAVAFIEKIQASDGSWYGSWGVCFTYGTWFGIKGLIAAGKNFSNCLSIRKACEFLLSKQLPSGGWAESYLSCQNKVYSNLEGNRSHVVNTGWAMLALIEAEQAKRDPTPLHRAAVCLINSQLENGDFPQEEIMGVFNKNCMITYAAYRCIFPIWALGEYRRVLQAC

SEQ ID NO: 192 - protein, 767 aa, Cucurbita pepo subsp. pepo cycloartenol synthase
MAWQLKIGADTVPSDPSNAGGWLSTLNNHVGRQVWHFHPELGSPEDLQQIQQARQHFSDHRFEKKHSADLLMRMQFAKENSSFVNLPQVKVKDKEDVTEEAVTRTLRRAINFYSTIQADDGHWPGDLGGPMFLIPGLVITLSITGALNAVLSTEHQREICRYLYNHQNKDGGWGLHIEGPSTMFGSVLNYVTLRLLGEEAEDGQGAVDKARKWILDHGGAAAITSWGKMWLSVLGVYEWAGNNPLPPELWLLPYLLPCHPGRMWCHCRMVYLPMCYLYGKRFVGPITPIIRSLRKELYLVPYHEVDWNKARNQCAKEDLYYPHPLVQDILWATLHHVYEPLFMHWPAKRLREKALQSVMQHIHYEDENTRYICIGPVNKVLNMLCCWAEDPHSEAFKLHIPRIYDYLWIAEDGMKMQGYNGSQLWDTAFAVQAIISTELAEEYETTLRKAHKYIKDSQVLEDCPGDLQSWYRHISKGAWPFSTADHGWPISDCTAEGLKAVLLLSKLPSEIVGKSIDEQQLYNAVNVILSLQNTDGGFATYELTRSYRWLELMNPAETFGDIVIDYPYVECSSAAIQALAAFKKLYPGHRRDEIDNCIAEAADFIESIQATDGSWYGSWGVCFTYGGWFGIRGLVAAGRRYNNCSSLRKACDFLLSKELAAGGWGESYLSCQNKVYTNIKDDRPHIVNTGWAMLSLIDAGQSERDPTPLHRAARVLINSQMEDGDFPQEEIMGVFNKNCMISYSAYRNIFPIWALGEYRSRVLKPLK

SEQ ID NO: 193 - protein, 761 aa, Zostera marina cycloartenol synthase
MAWKLKVAEGRDARLRTINGHVGRQIWEFDPDLGTDNERAEVEAVREKFRNNRFEKKHSSDLLMRLQLAKENPVSSYLTQVKLEENEDITEEAVTMTLRRALNFHSSIQSFDGHWAGDLGGPMFLMPGLVISLYITGVLNTVLSSEHQREMCRYLYNHQNEDGGWGLHIEGPSTVFGSTLTYITLRLLGENVEDGDGAMEKGRKWILDHGGATYITSWGKMWLSVLGVFDWSGNNPLPPEMWLLPYFLPVHPGRMWCHCRMVYLPMSYLYGKRFVGKITPLVLSLRNEIYTVSYNQIDWNKARNLCAKEDLYYPHPMVQDILWATLHKFVEPILMHWPGTLLREKALNTTMQHIHYEDESTRYICIGPVNKVLNMLCCWVDDPDSEAFKLHLPRISDYLWIAEDGMKCQGYNGSQLWDTAFAVQAYIATNLSDEFGPVLTKAHEYIKNSQVPDDCSGDLSFWYRHISKGAWPFSTGDHGWPISDCTAEGLKASLLLSRISPEVVGKPLNAKRFYDAVNVILSLMNSDGSFATYELTRSYTWLEMINPAETFGDIVIDYPYVECTSAAIQSLVAFTKLYPGHRREEIDECITKAAKFIESIQKKDGSWYGSWAVCFTYGLWFGIKGLIAAGKTYKNSSAIRKACEFLLSKQLASGGWGESYLSCQDKVYTNLEGNRAHAVNTGWAMLSLIDAGQAERDPSPLHRAARVLINSQMGNGDFPQEEIMGVFNRNCMISYSAYRNIFPIWALGEYRCKVLASKGHE

SEQ ID NO: 194 - protein, 475 aa, Cucumis sativus
MAWTILLGLATLAIAYYIHWVNKWKDSKFNGVLPPGTMGLPLIGETIQLSRPSDSLDVHPFIQRKVKRYGPIFKTCLAGRPVVVSTDAEFNHYIMLQEGRAVEMWYLDTLSKFFGLDTEWLKALGLIHKYIRSITLNHFGAESLRERFLPRIEESARETLHYWSTQTSVEVKESAAAMVFRTSIVKMFSEDSSKLLTEGLTKKFTGLLGGFLTLPLNLPGTTYHKCIKDMKQIQKKLKDILEERLAKGVKIDEDFLGQAIKDKESQQFISEEFIIQLLFSISFASFESISTTLTLILNFLADHPDVVKELEAEHEAIRKARADPDGPITWEEYKSMNFTLNVICETLRLGSVTPALLRKTTKEIQIKGYTIPEGWTVMLVTASRHRDPEVYKDPDTFNPWRWKELDSITIQKNFMPFGGGLRHCAGAEYSKVYLCTFLHILFTKYRWRKLKGGKIARAHILRFEDGLYVNFTPKE

SEQ ID NO: 195 - protein, 485 aa, Cucumis sativus
MALLSEYGLFLAKIVTVVLAIAAIAAIIHWVNKWKDSKFNGVLPPGTMGLPLIGETIQLSRPSDSLDVHPFIQRKVKRYGPIFKTCLAGRPVVVSTDAEFNHYIMLQEGRAVEMWYLDTLSKFFGLDTEWLKALGLIHKYIRSITLNHFGAESLRERFLPRIEESARETLHYWSTQTSVEVKESAAAMVFRTSIVKMFSEDSSKLLTEGLTKKFTGLLGGFLTLPLNLPGTTYHKCIKDMKQIQKKLKDILEERLAKGVKIDEDFLGQAIKDKESQQFISEEFIIQLLFSISFASFESISTTLTLILNFLADHPDVVKELEAEHEAIRKARADPDGPITWEEYKSMNFTLNVICETLRLGSVTPALLRKTTKEIQIKGYTIPEGWTVMLVTASRHRDPEVYKDPDTFNPWRWKELDSITIQKNFMPFGGGLRHCAGAEYSKVYLCTFLHILFTKYRWRKLKGGKIARAHILRFEDGLYVNFTPKE

SEQ ID NO: 196 - protein, 482 aa, Cucumis sativus
MAQDLRLILIIVGAIAIIALLVHGFHWVNKWKDSKFNGVLPPGTMGLPLIGETIQLSRPSDSLDVHPFIQRKVKRYGPIFKTCLAGRPVVVSTDAEFNHYIMLQEGRAVEMWYLDTLSKFFGLDTEWLKALGLIHKYIRSITLNHFGAESLRERFLPRIEESARETLHYWSTQTSVEVKESAAAMVFRTSIVKMFSEDSSKLLTEGLTKKFTGLLGGFLTLPLNLPGTTYHKCIKDMKQIQKKLKDILEERLAKGVKIDEDFLGQAIKDKESQQFISEEFIIQLLFSISFASFESISTTLTLILNFLADHPDVVKELEAEHEAIRKARADPDGPITWEEYKSMNFTLNVICETLRLGSVTPALLRKTTKEIQIKGYTIPEGWTVMLVTASRHRDPEVYKDPDTFNPWRWKELDSITIQKNFMPFGGGLRHCAGAEYSKVYLCTFLHILFTKYRWRKLKGGKIARAHILRFEDGLYVNFTPKE

SEQ ID NO: 197 - protein, 475 aa, Cucumis sativus
MAWTILLGLATLAIAYYIHWVNKWKDSKFNGVLPPGTMGLPLIGETIQFSRPSDSLDVHPFIQRKVKRYGPIFKTCIAGRPVVVSTDAEFNHYIMLQEGRAVEMWYLDTFSKFLGLDTEWLKALGLIHKYIRSITLNHFGAESLRERFLPRIEESARETLHYWSTQTSVEVKESAAAMVFRTSIVKMFSEDSSKLLTEGLTKKFTGLLGGFLTLPLNLPGTTYHKCIKDMKQIQKKLKDILEERLAKGVKIDEDFLGQAIKDKESQQFISEEFIIQLLFSISFASFASISTTLTLILNFLADHPDVVKELEAEHEAIRKARADPDGPITWEEYKSMNFTLNVICETLRLGSVTPALLRKTTKEIQIKGYTIPEGWTVMLVTASRHRDPEVYKDPDTFNPWRWKELDSITIQKNFMPFGGGLRHCAGAEYSKVYLCTFLHILFTKYRWRKLKGGKIARALILRFEDGLYVNFTPKE

SEQ ID NO: 198 - protein, 485 aa, Cucumis sativus
MALLSEYGLFLAKIVTVVLAIAAIAAIIHWVNKWKDSKFNGVLPPGTMGLPLIGETIQFSRPSDSLDVHPFIQRKVKRYGPIFKTCIAGRPVVVSTDAEFNHYIMLQEGRAVEMWYLDTFSKFLGLDTEWLKALGLIHKYIRSITLNHFGAESLRERFLPRIEESARETLHYWSTQTSVEVKESAAAMVFRTSIVKMFSEDSSKLLTEGLTKKFTGLLGGFLTLPLNLPGTTYHKCIKDMKQIQKKLKDILEERLAKGVKIDEDFLGQAIKDKESQQFISEEFIIQLLFSISFASFASISTTLTLILNFLADHPDVVKELEAEHEAIRKARADPDGPITWEEYKSMNFTLNVICETLRLGSVTPALLRKTTKEIQIKGYTIPEGWTVMLVTASRHRDPEVYKDPDTFNPWRWKELDSITIQKNFMPFGGGLRHCAGAEYSKVYLCTFLHILFTKYRWRKLKGGKIARALILRFEDGLYVNFTPKE

SEQ ID NO: 199 - protein, 485 aa, Cucurbita pepo subsp. pepo
MALLSEYGLFLAKIVTVVLAIAAIAAIIHWINKWKDSKFNGVLPPGTMGLPLVGETLQLARPSDSLDVHPFIKKKVKRYGPIFKTCLAGRPVVVSTDAEFNNYIMLQEGRAVEMWYLDTLSKFFGLDTEWLKALGFIHKYIRSITLNHFGAESLRERFLPRIEESAKETLRYWATQPSVEVKDSAAVMVFRTSMVKMVSEDSSKLLTGGLTKKFTGLLGGFLTLPINVPGTTYNKCMKDMKEIQKKLREILEGRLASGGGSDEDFLGQAIKDKGSQQFISDDFIIQLLFSISFASFESISTTLTLVLNYLADHPDVVKELEAEHEAIRNARADPDGPITWEEYKSMTFTLHVIFETLRLGSVTPALLRKTTKELQINGYTIPEGWTVMLVTASRHRDPAVYKDPHTFNPWRWKELDSITIQKNFMPFGGGLRHCAGAEYSKVYLCTFLHILFTKYRWTKLKGGKVARAHILSFEDGLHVKFTPKE

SEQ ID NO: 200 - protein, 465 aa, Cucurbita pepo subsp. pepo
MALLLAVFHWINKWKDSKFNGVLPPGTMGLPLVGETLQLARPSDSLDVHPFIKKKVKRYGPIFKTCLAGRPVVVSTDAEFNNYIMLQEGRAVEMWYLDTLSKFFGLDTEWLKALGFIHKYIRSITLNHFGAESLRERFLPRIEESAKETLRYWATQPSVEVKDSAAVMVFRTSMVKMVSEDSSKLLTGGLTKKFTGLLGGFLTLPINVPGTTYNKCMKDMKEIQKKLREILEGRLASGGGSDEDFLGQAIKDKGSQQFISDDFIIQLLFSISFASFESISTTLTLVLNYLADHPDVVKELEAEHEAIRNARADPDGPITWEEYKSMTFTLHVIFETLRLGSVTPALLRKTTKELQINGYTIPEGWTVMLVTASRHRDPAVYKDPHTFNPWRWKELDSITIQKNFMPFGGGLRHCAGAEYSKVYLCTFLHILFTKYRWTKLKGGKVARAHILSFEDGLHVKFTPKE

SEQ ID NO: 201 - protein, 709 aa, Camptotheca acuminate
MAQSSSVKVSTFDLMSAILRGRSMDQTNVSFESGESPALAMLIENRELVMILTTSVAVLIGCFVVLLWRRSSGKSGKVTEPPKPLMVKTEPEPEVDDGKKKVSIFYGTQTGTAEGFAKALAEEAKVRYEKASFKVIDLDDYAADDEEYEEKLKKETLTFFFLATYGDGEPTDNAARFYKWFMEGKERGDWLKNLHYGVFGLGNRQYEHFNRIAKVVDDTIAEQGGKRLIPVGLGDDDQCIEDDFAAWRELLWPELDQLLQDEDGTTVATPYTAAVLEYRVVFHDSPDASLLDKSFSKSNGHAVHDAQHPCRANVAVRRELHTPASDRSCTHLEFDISGTGLVYETGDHVGVYCENLIEVVEEAEMLLGLSPDTFFSIHTDKEDGTPLSGSSLPPPFPPCTLRRALTQYADLLSSPKKSSLLALAAHCSDPSEADRLRHLASPSGKDEYAQWVVASQRSLLEVMAEFPSAKPPIGAFFAGVAPRLQPRYYSISSSPRMAPSRIHVTCALVFEKTPVGRIHKGVCSTWMKNAVPLDESRDCSWAPIFVRQSNFKLPADTKVPVLMIGPGTGLAPFRGFLQERLALKEAGAELGPAILFFGCRNRQMDYIYEDELNNFVETGALSELIVAFSREGPKKEYVQHKMMEKASDIWNMISQEGYIYVCGDAKGMARDVHRTLHTIVQEQGSLDSSKTESMVKNLQMNGRYLRDVW

SEQ ID NO: 202 - protein, 496 aa, Arabidopsis thaliana
MATEKTHQFHPSLHFVLFPFMAQGHMIPMIDIARLLAQRGVTITIVTTPHNAARFKNVLNRAIESGLAINILHVKFPYQEFGLPEGKENIDSLDSTELMVPFFKAVNLLEDPVMKLMEEMKPRPSCLISDWCLPYTSIIAKNFNIPKIVFHGMGCFNLLCMHVLRRNLEILENVKSDEEYFLVPSFPDRVEFTKLQLPVKANASGDWKEIMDEMVKAEYTSYGVIVNTFQELEPPYVKDYKEAMDGKVWSIGPVSLCNKAGADKAERGSKAAIDQDECLQWLDSKEEGSVLYVCLGSICNLPLSQLKELGLGLEESRRSFIWVIRGSEKYKELFEWMLESGFEERIKERGLLIKGWAPQVLILSHPSVGGFLTHCGWNSTLEGITSGIPLITWPLFGDQFCNQKLVVQVLKAGVSAGVEEVMKWGEEDKIGVLVDKEGVKKAVEELMGDSDDAKERRRRVKELGELAHKAVEKGGSSHSNITLLLQDIMQLAQFKN

SEQ ID NO: 203 - protein, 438 aa, MlSQE
MAKEEFDICIIGAGMAGATISAYLAPKGIKIALIDRCYKEKKRIVGELLQPGAVLSLEQMGLSHLLDGFEAQTVKGYALLQGNEKTTIPYPSQHEGIGLHNGRFLQQIRASALENSSVTQIHGKALQLLENERNEIIGVSYRESITSQIKSIYAPLTITSDGFASNFRAHLSNNQKTVTSYFIGLILKDCEMPFPKHGHVFLSGPTPFICYPISDNEVRLLIDFPGEQLPRKNLLQEHLDTNVTPYIPECMRSSYAQAIQEGGFKVMPNHYMAAKPIVRKGAVLLGDALNMRHPLTGGGLTAVFSDIQILSAHLLAMPDFKNTDLIHEKIEAYYRDRKRANANLNILANALYAVMSNDLLKTAVFKYLQCGGANAQESIALLAGLNRKHFSLIKQYCFLAVFGACNLLQQSISNIPKALKLLKDAFVIIKPLIKNELS

SEQ ID NO: 204 - protein, 466 aa, Hordeum vulgare subsp. Vulgare HvUGT_B1
MAQAESERMRVVMFPWLAHGHINPYLELAKRLIASASGDHHLDVVVHLVSTPANLAPLAHHQTDRLRLVELHLPSLPDLPPALHTTKGLPARLMPVLKRACDLAAPRFGALLDELCPDILVYDFIQPWAPLEAEARGVPAFHFATCGAAATAFFIHCLKTDRPPSAFPFESISLGGVDEDAKYTALVTVREDSTALVAERDRLPLSLERSSGFVAVKSSADIERKYMEYLSQLLGKEIIPTGPLLVDSGGSEEQRDGGRIMRWLDGEEPGSVVFVSFGSEYFMSEHQMAQMARGLELSGVPFLWVVRFPNAEDDARGAARSMPPGFEPELGLVVEGWAPQRRILSHPSCGAFLTHCGWSSVLESMAAGVPMVALPLHIDQPLNANLAVELGAAAARVKQERFGEFTAEEVARAVRAAVKGKEGEAARRRARELQEVVARNNGNDGQIATLLQRMARLCGKDQAVPN

SEQ ID NO: 205 - protein, 476 aa, Hordeum vulgare subsp. Vulgare HvUGT_B3
MAEANDGGKMHVVMLPWLAFGHVLPFTEFAKRVARQGHRVTLLSAPRNTRRLIDIPPGLAGLIRVVHVPLPRVDGLPEHAEATIDLPSDHLRPCLRRAFDAAFERELSRLLQEEAKPDWVLVDYASYWAPTAAARHGVPCAFLSLFGAAALSFFGTPETLLGIGRHAKTEPAHLTVVPEYVPFPTTVAYRGYEARELFEPGMVPDDSGVSEGYRFAKTIEGCQLVGIRSSSEFEPEWLRLLGELYRKPVIPVGLFPPAPQDDVAGHEATLRWLDGQAPSSVVYAAFGSEVKLTGAQLQRIALGLEASGLPFIWAFRAPTSTETGAASGGLPEGFEERLAGRGVVCRGWVPQVKFLAHASVGGFLTHAGWNSIAEGLAHGVRLVLLPLVFEQGLNARNIVDKNIGVEVARDEQDGSFAAGDIAAALRRVMVEDEGEGFGAKVKELAKVFGDDEVNDQCVREFLMHLSDHSKKNQGQD

SEQ ID NO: 206 - protein, 463 aa, MbUGT1,2.2; identical to SEQ ID NO: 163

SEQ ID NO: 207 - protein, 453 aa, Coffea canephora
MAENHATFNVLMLPWLAHGHVSPYLELAMKLTARNFNVYLCSSPATLSSVRSKLTEKFSQSIHLVELHLPKLPELPAEYHTTNGLPPHLMPTLKDAFDMAKPNFCNVLKSLKPDLLIYDLLQPWAPEAASAFNIPAVVFISSSATMTSFGLHFFKNPGTKYPYGNTIFYRDYESVFVENLKKRDRDTYRVVNCMERSSKIILIKGFKEIEGKYFDYFSCLTGKKVVPVGPLVQDPVLDDEDCRIMQWLNKKEKGSTVFVSFGSEYFLSKEDMEEIAHGLELSNVDFIWVVRFPKGENIVIEETLPKGFFERVGERGLVVNGWAPQAKILTHPNVGGFVSHCGWNSVMESMKFGLPIVAMPMHLDQPINARLIEEVGAGVEVLRDSKGKLHRERMAETINKVTKEASGEPARKKARELQEKLELKGDEEIDDVVKELVQLCATKNKRNGLHCYN

SEQ ID NO: 208 - protein, 452 aa, Coffea eugenioides
MAENHATFNVLMLPWLAHGHVSPYLELAKKLTARNFNVYLCSSPATLSSVRSKLTEKFSQSIHLVELHLPKLPELPAEYHTTNGLPPHLMPTLKDAFDMAEPNFCNVLKSLKPDLLIYDLLQPWAPEAASAFNIPAVVFISSSATMTSFGLHFFKNPGTKYPYGNTIFYRDYESVFVENLKRRDRDTYRVVNCMERSSKIILIKGFKEIEGKYFDYFSCLTGKKVVPVGPLVQDPVLDDEDCRIMQWLNKKEKGSTVFVSFGSEYFLSKEDMEEIAHGLELSNVDFIWVVRFPKGENIVIEETLPKGFFERVGERGLVVNGWAPQAKILTHPNVGGFVSHCGWNSVMESMKFGLPIIAMPMHLDQPINARLIEEVGAGVEVLRDSKGKLHRERMAETINKVTKEASGESVRKKARELQEKLELKGDEEIDDVVKELVQLCATKNKRNGLHYN

SEQ ID NO: 209 - protein, 452 aa, Coffea eugenioides
MAENHATFNVLMLPWLAHGHVSPYLELAKKLTARNFNVYLCSSPATLSSVRSKLTEKFSQSIHLVELHLPKLPELPAEYHTTNGLPPHLMPTLKDAFDMAKPNFCNVLKSLKPDLLIYDLLQPWAPEAASAFNIPAVVFISSSATMTSFGLHFFKNPGTKYPYGNAIFYRDYESVFVENLTRRDRDTYRVINCMERSSKIILIKGFNEIEGKYFDYFSCLTGKKVVPVGPLVQDPVLDDEDCEIMQWLNKKEKVSTVFVSFGSEYFLSKKDMEEIAHGLELSNVDFIWVVRFPKGENIVIEETLPKGFFERVGERGLVVNGWAPQAKILTHPNVGGFVSHCGWNSVMESMKFGLPIIAMPMHLDQPINARLIEEVGAGVEVLRDSKGKLHRERMAETINKVMKEASGESVRKKARELQEKMDLKGDEEIDDVVKELVQLCATKNKRNGLHYY

SEQ ID NO: 210 - protein, 453 aa, Siraitia grosvenorii
MADAAQQGDTTTILMLPWLGYGHLSAFLELAKSLSRRNFHIYFCSTSVNLDAIKPKLPSSFSDSIQFVELHLPSSPEFPPHLHTTNGLPPTLMPALHQAFSMAAQHFESILQTLAPHLLIYDSLQPWAPRVASSLKIPAINFNTTGVFVISQGLHPIHYPHSKFPFSEFVLHNHWKAMYSTADGASTERTRKRGEAFLYCLHASCSVILINSFRELEGKYMDYLSVLLNKKVVPVGPLVYEPNQDGEDEGYSSIKNWLDKKEPSSTVFVSFGSEYFPSKEEMEEIAHGLEASEVNFIWVVRFPQGDNTSGIEDALPKGFLERAGERGMVVKGWAPQAKILKHWSTGGFVSHCGWNSVMESMMFGVPIIGVPMHVDQPFNAGLVEEAGVGVEAKRDPDGKIQRDEVAKLIKEVVVEKTREDVRKKAREMSEILRSKGEEKFDEMVAEISLLLKI

SEQ ID NO: 211 - protein, 474 aa, Oryza sativa
MAQAERERLRVLMFPWLAHGHINPYLELATRLTTTSSSQIDVVVHLVSTPVNLAAVAHRRTDRISLVELHLPELPGLPPALHTTKHLPPRLMPALKRACDLAAPAFGALLDELSPDVVLYDFIQPWAPLEAAARGVPAVHFSTCSAAATAFFLHFLDGGGGGGGRGAFPFEAISLGGAEEDARYTMLTCRDDGTALLPKGERLPLSFARSSEFVAVKTCVEIESKYMDYLSKLVGKEIIPCGPLLVDSGDVSAGSEADGVMRWLDGQEPGSVVLVSFGSEYFMTEKQLAEMARGLELSGAAFVWVVRFPQQSPDGDEDDHGAAAARAMPPGFAPARGLVVEGWAPQRRVLSHRSCGAFLTHCGWSSVMESMSAGVPMVALPLHIDQPVGANLAAELGVAARVRQERFGEFEAEEVARAVRAVMRGGEALRRRATELREVVARRDAECDEQIGALLHRMARLCGKGTGRAAQLGH

SEQ ID NO: 212 - protein, 357 aa, Mycobacterium tuberculosis
MASQVHRILNCRGTRIHAVADSPPDQQGPLVVLLHGFPESWYSWRHQIPALAGAGYRVVAIDQRGYGRSSKYRVQKAYRIKELVGDVVGVLDSYGAEQAFVVGHDWGAPVAWTFAWLHPDRCAGVVGISVPFAGRGVIGLPGSPFGERRPSDYHLELAGPGRVWYQDYFAVQDGIITEIEEDLRGWLLGLTYTVSGEGMMAATKAAVDAGVDLESMDPIDVIRAGPLCMAEGARLKDAFVYPETMPAWFTEADLDFYTGEFERSGFGGPLSFYHNIDNDWHDLADQQGKPLTPPALFIGGQYDVGTIWGAQAIERAHEVMPNYRGTHMIADVGHWIQQEAPEETNRLLLDFLGGLRP

SEQ ID NO: 213 - protein, 443 aa, Panax ginseng
MADNQNGRISIALLPFLAHGHISPFFELAKQLAKRNCNVFLCSTPINLSSIKDKDSSASIKLVELHLPSSPDLPPHYHTTNGLPSHLMLPLRNAFETAGPTFSEILKTLNPDLLIYDFNPSWAPEIASSHNIPAVYFLTTAAASSSIGLHAFKNPGEKYPFPDFYDNSNITPEPPSADNMKLLHDFIACFERSCDIILIKSFRELEGKYIDLLSTLSDKTLVPVGPLVQDPMGHNEDPKTEQIINWLDKRAESTVVFVCFGSEYFLSNEELEEVAIGLEISTVNFIWAVRLIEGEKKGILPEGFVQRVGDRGLVVEGWAPQARILGHSSTGGFVSHCGWSSIAESMKFGVPVIAMARHLDQPLNGKLAAEVGVGMEVVRDENGKYKREGIAEVIRKVVVEKSGEVIRRKARELSEKMKEKGEQEIDRALEELVQICKKKKDEQ

SEQ ID NO: 214 - protein, 499 aa, Stevia rebaudiana
MAHHHHHHVGTGSNDDDDKSPDPNWASTSELVFIPSPGAGHLPPTVELAKLLLHRDQRLSVTIIVMNLWLGPKHNTEARPCVPSLRFVDIPCDESTMALISPNTFISAFVEHHKPRVRDIVRGIIESDSVRLAGFVLDMFCMPMSDVANEFGVPSYNYFTSGAATLGLMFHLQWKRDHEGYDATELKNSDTELSVPSYVNPVPAKVLPEVVLDKEGGSKMFLDLAERIRESKGIIVNSCQAIERHALEYLSSNNNGIPPVFPVGPILNLENKKDDAKTDEIMRWLNEQPESSVVFLCFGSMGSFNEKQVKEIAVAIERSGHRFLWSLRRPTPKEKIEFPKEYENLEEVLPEGFLKRTSSIGKVIGWAPQMAVLSHPSVGGFVSHCGWNSTLESMWCGVPMAAWPLYAEQTLNAFLLVVELGLAAEIRMDYRTDTKAGYDGGMEVTVEEIEDGIRKLMSDGEIRNKVKDVKEKSRAAVVEGGSSYASIGKFIEHVSNVTI

SEQ ID NO: 215 - protein, 463 aa, Oryza sativa
MADSGYSSSYAAAAGMHVVICPWLAFGHLLPCLDLAQRLASRGHRVSFVSTPRNISRLPPVRPALAPLVAFVALPLPRVEGLPDGAESTNDVPHDRPDMVELHRRAFDGLAAPFSEFLGTACADWVIVDVFHHWAAAAALEHKVPCAMMLLGSAHMIASIADRRLERAETESPAAAGQGRPAAAPTFEVARMKLIRTKGSSGMSLAERFSLTLSRSSLVVGRSCVEFEPETVPLLSTLRGKPITFLGLMPPLHEGRREDGEDATVRWLDAQPAKSVVYVALGSEVPLGVEKVHELALGLELAGTRFLWALRKPTGVSDADLLPAGFEERTRGRGVVATRWVPQMSILAHAAVGAFLTHCGWNSTIEGLMFGHPLIMLPIFGDQGPNARLIEAKNAGLQVARNDGDGSFDREGVAAAIRAVAVEEESSKVFQAKAKKLQEIVADMACHERYIDGFIQQLRSYKD

SEQ ID NO: 216 - protein, 494 aa, Camelina sativa
MASEKTLQVHPPLHFVLFPFMAQGHMIPMVDIARLLAQRGATVTIVTTRYNAGRFENVLSRAVESGLPINIVHVKFPYEEVGLPKGKENIDSLDSMELMVPFFKAVNMLQDPVVKLMEEMESRPSCIISDLLLPYTSKIAKKFNIPKIVFHGISCFCLLCVHVLRRNLEILTNLKSDKEYFLVPSFPDRVEFTKPQVTVETNASGDWKEFLDEMVEAEDTSYGVIINTFEELEPAYVKDYKDARAGNVWSIGPVSLCNKAGVDKAERGNKATIDQDECLKWLDSKEEGSVLYVCLGSICNLPLVQLKELGLGLEESQRPFIWVIRGWEKYNELSEWMVESGFEERIRERGLLIRGWAPQVLILSHPSVGGFLTHCGWNSTVEGITSGVPLITWPLFGDQFCNQTLVVQVLKAGVSVGVEEVMKWGEEEKIGVLVDKEGVKKAVEDLMGESDDAKERTKRVKELGGLAHKAVEEGGSSHSNITLFLQDIRQVQSV

SEQ ID NO: 217 - protein, 478 aa, Glycyrrhiza uralensis
MADVAEEQPLKIYFIPYLAAGHMIPLCDIATLFASRGHHVTIITTPSNAQTLRESHHFRVQTIQFPSQEVGLPAGVQNLTAVTNLDDSYKIYHATMLLRKHIEDFVERDPPDCIVADFLFPWVDDVATKLHIPRLVFNGFTLFTICAMESHKAHPLPVDAASGSFVIPDFPHHVTINSTPPKRTKEFVDPLLTEAFKSHGFLINSFVELDGEECVEHYERITGGHKAWHLGPAFLVHRTAQDRGEKSVVSTQECLSWLDSKRDNSVLYICFGTICYFPDKQLYEIASAIEASGHEFIWVVPEKRGNADESEEEKEKWLPKGFEERNNGKKGMIIRGWAPQVAILGHPAVGGFLTHCGWNSTVEAVSAGVPMITWPVHSDQYFNEKLITQVRGIGVEVGAEEWIVTAFRETEKLVGRDRIERAVRRVMDGGDEAVQIRRRARELGEMARQAVQEGGSSHTNLTALINDLKRWRDSKQLN

SEQ ID NO: 218 - protein, 491 aa, Glycyrrhiza uralensis
MAVFQANQPHFVLFPLMAQGHIIPMIDIARLLAQRGAIVTIFTTPKNASRFTSVLSRAVSSGLQIRLVHLHFPSKEAGLPEGCENLDMVASHDMICNIFQAIRMLQKQAEELFETLTPKPSCIISDFCIPWTTQVAEKHHIPRISFHGFSCFCLHCMLKIHTSKVLEGITSESEYFTVPGIPDQIQVTKQQVPGPMIDEMKEFGEQMRDAEIRSYGVIINTFEELEKAYVNDYKKERNGKVWCIGPVSLCNKDGLDKAQRGNKASISEHHCLEWLDLQQPNSVIYVCLGSLCNLTPPQLMELALGLEATKRPFIWVIREGNKFEELEKWISEEGFEERIKGRGLIIRGWAPQVLILSHPSIGGFLTHCGWNSTLEGVTAGVPMVTWPLFADQFLNEKLVTQVLRIGVSLGVDVPLKWGEEEKVGVQVKKEGIEKAICMVMDEGEESKERRERAKELSEMAKRAVEKDGSSHLNMTMLIQDIMQQSSSKVET

SEQ ID NO: 219 - protein, 759 aa, Artemisia annua
MAWKLKIAEGGDPWLRTTNDHIGRQIWEFDPTLGSVEELAEIEKLRKTFRDNRFEKKHSADLLMRSQFAKENSVSVFPPKVNIKDVEDITEDKVTNVLRRAIGFHSTLQADDGHWPGDLGGPMFLLPGLVITLSITGALNAVLSKEHKREMCRYLYNHQNIDGGWGLHIEGHSTMFGSALNYVTLRLLGEGANDGEGAMEKGRKWILDHGGATAITSWGKFWLSVLGVFEWPGNNPLPPEMWLLPYFLPVHPGRMWCHCRMVYLPMSYLYGKRFVGPITSTVLALRKELFTVPYHDIDWNEARNLCAKEDLYYPHPLIQDVLWATLDKFVEPVLMSWPGKKLREKALRTAMEHIHYEDENTRYICIGPVNKVLNMLCCWVEDPNSEAFKLHLPRIQDYLWIAEDGMKMQGYNGSQLWDAAFTVQAIMSTNLIEEFGPTLKKGHIFIKKSQVLDNCYGDLDYWYRHISKGAWPFSTADHGWPISDCTAEGLKAALLLSKLPSEIVDEPLDAKRFYDAVNVILSLMNADGSFATYELTRSYSWLELINPAETFGDIVIDYPYVECTSAAIQALVAFKRLYPGHRRDEVQGCIDKAAAFLEKIQEADGSWYGSWAVCFTYGTWFGVKGLVAAGKNYSNCSSIRKACNFLLSKQLASGGWGESYLSCVDKVYTNLEGNRSHVVNTGWAMLALIDAEQAKRDPTPLHRAARVLINSQMENGEFPQQEIMGVFNRNCMITYAAYRNIFPIWALGEYRCRVLKVET

SEQ ID NO: 220 - protein, 765 aa, Citrullus colocynthis
MAWRLKVGAESVGEKEEKWLKSISNHLGRQVWEFCAHQPTASPNHLQQIDNARNHFRNNRFHRKQSSDLFLAIQNEKEIANVTKGGGIKVKEEEDVRKETVKNTVERALSFYSAIQTNDGNWASDLGGPMFLLPGLVIALYVTGVLNSVLSKHHRQEMCRYLYNHQNEDGGWGLHIEGTSTMFGSALNYVALRLLGEDADGGEGGAMTKARSWILDRGGATAITSWGKLWLSVLGVYEWSGNNPLPPEFWLLPYCLPFHPGRMWCHCRMVYLPMSYLYGKRFVGPITPIVLSLRKELYTIPYHEIDWNRSRNTCAKEDLYYPHPKMQDILWGSIYHLYEPLFTRWPGKRLREKALQMAMKHIHYEDENSRYICLGPVNKVLNMLCCWVEDPYSDAFKFHLQRVPDYLWVAEDGMRMQGYNGSQLWDTAFSVQAIISTKLIDSFGTTLKKAHDFVKDSQIQQDCPGDPNVWFRHIHKGAWPFSTRDHGWLISDCTAEGLKASLMLSKLPSKIVGEPLEKSRLCDAVNVLLSLQNENGGFASYELTRSYPWLELINPAETFGDIVIDYPYVECTSATMEALTLFKKLHPGHRTKEIDIAVARAANFLENMQRTDGSWYGCWGVCFTYAGWFGIKGLVAAGRTYNSCVAIRKACDFLLSKELPGGGWGESYLSCQNKVYTNLEGNRPHLVNTAWVLMALIEAGQAERDPAPLHRAARLLINSQLENGDFPQEEIMGVFNKNCMITYAAYRNIFPIWALGEYFHRVLTE

SEQ ID NO: 221 - protein, 520 aa, Siraitia grosvenorii
MEMSSSVAATISIWMVVVCIVGVGWRVVNWVWLRPKKLEKRLREQGLAGNSYRLLFGDLKERAAMEEQANSKPINFSHDIGPRVFPSMYKTIQNYGKNSYMWLGPYPRVHIMDPQQLKTVFTLVYDIQKPNLNPLIKFLLDGIVTHEGEKWAKHRKIINPAFHLEKLKDMIPAFFHSCNEIVNEWERLISKEGSCELDVMPYLQNLAADAISRTAFGSSYEEGKMIFQLLKELTDLVVKVAFGVYIPGWRFLPTKSNNKMKEINRKIKSLLLGIINKRQKAMEEGEAGQSDLLGILMESNSNEIQGEGNNKEDGMSIEDVIEECKVFYIGGQETTARLLIWTMILLSSHTEWQERARTEVLKVFGNKKPDFDGLSRLKVVTMILNEVLRLYPPASMLTRIIQKETRVGKLTLPAGVILIMPIILIHRDHDLWGEDANEFKPERFSKGVSKAAKVQPAFFPFGWGPRICMGQNFAMIEAKMALSLILQRFSFELSSSYVHAPTVVFTTQPQHGAHIVLRKL
